(19) United States
(12) Patent Application Publication
(10) Pub. No.: US 2026/0070982 A1
(43) Pub. Date: Mar. 12, 2026

(54) ANTIGEN BINDING MOLECULES TO CD3 AND CD19

(71) Applicant: XENCOR, INC., Pasadena, CA (US)

(72) Inventors: Matthew Bernett, Pasadena, CA (US); Gregory L. Moore, Pasadena, CA (US); Viralkumar Rameshkumar Davra, Pasadena, CA (US); Katrina Bykova, Pasadena, CA (US); Seung Y. Chu, Pasadena, CA (US); Jing Qi, Pasadena, CA (US); Su-Shin Hao, Pasadena, CA (US); Kendra Avery, Pasadena, CA (US); Jitendra Kanodia, Pasadena, CA (US); Juan Diaz, Pasadena, CA (US)

(21) Appl. No.: 19/321,270

(22) Filed: Sep. 7, 2025

Related U.S. Application Data
(60) Provisional application No. 63/692,069, filed on Sep. 7, 2024.
(60) Provisional application No. 63/793,511, filed on Apr. 23, 2025.

(51) Int. Cl. C07K 16/28; A61K 39/00; A61P 35/00; A61P 37/06

(52) U.S. Cl. CPC C07K 16/2809; A61P 35/00; A61P 37/06; C07K 16/2803; A61K 2039/505; C07K 2317/31; C07K 2317/51; C07K 2317/522; C07K 2317/524; C07K 2317/526; C07K 2317/53; C07K 2317/55; C07K 2317/565; C07K 2317/567; C07K 2317/622

(57) ABSTRACT

Disclosed herein are anti-CD3 antigen binding molecules, anti-CD19 antigen binding molecules, anti-CD19 and anti-CD3 bi-specific antigen binding molecules, and methods for the use thereof.

### CROSS REFERENCE TO RELATED APPLICATIONS

[0001] This application claims priority to U.S. Provisional Application No. 63/793,511, filed on Apr. 23, 2025, and U.S. Provisional Application No. 63/692,069, filed on Sep. 7, 2024, the disclosures of each of which are hereby incorporated by reference in their entireties.

### SEQUENCE LISTING

[0002] The contents of the electronic sequence listing (121168000407_Sequence_Listing_ST26.xml; Size: 3,392,961 bytes; and Date of Creation: Aug. 25, 2025) is herein incorporated by reference in its entirety.

### TECHNICAL FIELD

[0003] Disclosed herein are antigen binding molecules binding CD3 and CD19, and methods for the use thereof.

### BACKGROUND

[0004] CD3 (Cluster of Differentiation 3) is a T-cell co-receptor that is present on both cytotoxic and helper T-cells. CD3 is involved in activating T-cells making CD3 a potential target to stimulate or block T cell activation. CD19 (Cluster of Differentiation 19) is a signaling glycoprotein that is present on all B-cells, which makes CD19 an important marker and potential target for therapies aimed to modulate for B-cells.

### SUMMARY

[0005] In a first aspect, the disclosure is directed to a bi-specific anti-CD19 and anti-CD3 antigen binding molecule comprising an anti-CD19 antigen binding domain and an anti-CD3 antigen binding domain.

[0006] In some variations, the anti-CD19 antigen binding domains comprise a first binding subunit comprising the CDR sequences of SEQ ID NOs: 1, 2, and 3, and a second binding subunit comprising the CDR sequences of SEQ ID NOs: 4, 5, and 6. The anti-CD3 antigen binding domains comprise a first binding subunit comprising the CDR sequences of SEQ ID NO: 9, SEQ ID NO: 10 or 11, and SEQ ID NO: 12, 13, 14, 15, or 16, and a second binding subunit comprising the CDR sequences of SEQ ID NOs: 17, 18, and 19.

[0007] In some variations, the bi-specific anti-CD19 and anti-CD3 antigen binding molecules include a first monomer, second monomer, and light chain. The first monomer comprises a scFv-domain linker-CH2-CH3 domain in which the scFv comprises an antigen binding domain that binds CD3, and the CH2-CH3 is a first variant Fc domain. The second monomer comprises a VH-CH1-hinge-CH2-CH3, in which the CH2-CH3 is a second variant Fc domain complementary to the first variant Fc domain. The first variant Fc domain and second variant Fc domain form a heterodimeric backbone. The light chain together with the second monomer forms a Fab domain that binds CD19. In some variations, the Fab domain is a Fv domain.

[0008] In some variations, the bi-specific anti-CD19 and anti-CD3 antigen binding molecules include first monomer, a second monomer, a first light chain, and a second light chain. The first monomer comprises a VH-CH1-first domain linker-scFv-second domain linker-CH2-CH3 in which the the scFv comprises an antigen binding domain that binds CD3, and the CH2-CH3 is a first variant Fc domain. The second monomer comprises a VH-CH1-hinge-CH2-CH3, in which the CH2-CH3 is a second variant Fc domain complementary to the first variant Fc domain. The first variant Fc domain and second variant Fc domain form a heterodimeric backbone. The first light chain together with the first monomer forms a Fab domain that binds CD19. The second light chain together with the second monomer forms a Fab domain that binds CD19. In some variations, the Fab domain is a Fv domain.

[0009] In a second aspect, the disclosure is directed to an anti-CD19 antigen binding molecules comprising an antigen binding domain. The antigen binding domain comprises a first binding subunit comprising the CDR sequences of SEQ ID NOs: 1, 2, and 3, and a second binding subunit comprising the CDR sequences of SEQ ID NOs: 4, 5, and 6.

[0010] In some variations, the anti-CD19 antigen binding molecules, comprising an antigen binding domain. The antigen binding domain comprises a first binding subunit, a second binding subunit, and a framework region comprising at least 95% identity to an amino acid sequence selected from the group consisting of SEQ ID NOs: 20, 21, 22, 23, 24, 25, 26, and 27.

[0011] In some variations, the anti-CD19 antigen binding molecules, comprising an antigen binding domain. The antigen binding domain comprises an amino acid sequence comprising at least 95% identity to SEQ ID NO: 20 N-terminal to a first binding subunit CDR1, an amino acid sequence comprising at least 95% identity to SEQ ID NO: 21 between the first binding subunit CDR1 and a first binding subunit CDR2, an amino acid sequence comprising at least 95% identity to SEQ ID NO: 22 between the first binding subunit CDR2 and a first binding subunit CDR3, an amino acid sequence comprising at least 95% identity to SEQ ID NO: 23 C-terminal to the first binding subunit CDR3, an amino acid sequence comprising at least 95% identity to SEQ ID NO: 24 N-terminal to a second binding subunit CDR1, an amino acid sequence comprising at least 95% identity to SEQ ID NO: 25 between the second binding subunit CDR1 and a second binding subunit CDR2, an amino acid sequence comprising at least 95% identity to SEQ ID NO: 26 between the second binding subunit CDR2 and a second binding subunit CDR3, and an amino acid sequence comprising at least 95% identity to SEQ ID NO: 27 C-terminal to the second binding subunit CDR3.

[0012] In a third aspect, the disclosure is directed to an anti-CD3 antigen binding molecules comprising an antigen binding domain. The antigen binding domain comprises a first binding subunit comprising the CDR sequences of SEQ ID NO: 9, SEQ ID NO: 10 or 11, and SEQ ID NO: 12, 13, 14, 15, or 16, and a second binding subunit comprising the CDR sequences of SEQ ID NOs: 17, 18, and 19.

[0013] In some variations, the anti-CD3 antigen binding molecules, comprising a first binding subunit and a second binding subunit, and a framework region comprising at least 95% identity to an amino acid sequence selected from the group consisting of SEQ ID NOs: 28, 29, 30, 31, 32, 33, 34, and 35.

[0014] In some variations, the anti-CD3 antigen binding molecules, comprising an amino acid sequence comprising at least 95% identity to SEQ ID NO: 28 N-terminal to a first binding subunit CDR1, an amino acid sequence comprising at least 95% identity to SEQ ID NO: 29 between the first binding subunit CDR1 and a first binding subunit CDR2, an amino acid sequence comprising at least 95% identity to SEQ ID NO: 30 between the first domain CDR2 and a first domain CDR3, an amino acid sequence comprising at least 95% identity to SEQ ID NO: 31 C-terminal to the first domain CDR3, an amino acid sequence comprising at least 95% identity to SEQ ID NO: 32 N-terminal to a second domain CDR1, an amino acid sequence comprising at least 95% identity to SEQ ID NO: 33 between the second domain CDR1 and a second domain CDR2, an amino acid sequence comprising at least 95% identity to SEQ ID NO: 34 between the second domain CDR2 and a second domain CDR3, and an amino acid sequence comprising at least 95% identity to SEQ ID NO: 35 C-terminal to the second domain CDR3.

### BRIEF DESCRIPTION OF THE DRAWINGS

[0015] The summary, as well as the following detailed description, is further understood when read in conjunction with the appended drawings. For the purpose of illustrating the disclosed compositions and methods, the drawings show example embodiments of the compositions and methods; however, the compositions and methods are not limited to the specific embodiments disclosed. In the drawings:

[0016] FIG. 1 depicts sequences for human, mouse, and cynomolgus CD3. Such CD3 sequences are useful for the development of cross-reactive CD3 antigen binding domains for ease of clinical development.

[0017] FIG. 2 depicts sequences for human, mouse, and cynomolgus CD19. Such CD19 sequences are useful for the development of cross-reactive CD19 antigen binding domains for ease of clinical development.

[0018] FIG. 3A-FIG. 3F depict useful pairs of heterodimerization variant sets (including skew and pI variants). There are variants for which there are no corresponding “monomer 2” variants (FIG. 3F). Such variants are pI variants that can be used alone on either monomer of a bispecific antibody (e.g., CD19×CD3 bsAb), or included, for example, on the non-scFv side of a format that utilizes an scFv as a component and an appropriate charged scFv linker can be used on the second monomer that utilizes an scFv as the CD3 binding domain. Suitable charged linkers are shown in FIG. 6. Skew variants and pI variants are described, for example, in U.S. Pat. Nos. 11,299,554, 9,850,320 U.S. Patent Publication No. 2023/0048390, PCT Publication WO2014/145806, and U.S. Pat. No. 9,650,446, each of which is hereby incorporated by reference in its entirety.

[0019] FIG. 4 depicts a list of isosteric variant antibody constant regions and their respective substitutions. pI_(−) indicates lower pI variants, while pI_(+) indicates higher pI variants. These variants can be optionally and independently combined with other variants, including heterodimerization variants, outlined herein, according to an illustrative embodiment.

[0020] FIG. 5A and FIG. 5B depict useful ablation variants that ablate FcTR binding (also referred to as “knockouts” or “KO” variants). In some embodiments, such ablation variants are included in the Fc domain of both monomers of the subject antibody described herein. In other embodiments, the ablation variants are only included on only one variant Fc domain.

[0021] FIG. 6 depicts a number of charged scFv linkers that find use in increasing or decreasing the pI of the subject heterodimeric bispecific antibodies that utilize one or more scFv as a component, as described herein (e.g., CD19×CD3 bispecific antibodies (bsAbs)). The (+H) positive linker finds particular use herein, particularly with anti-CD3 VL and VH sequences shown herein. A single prior art scFv linker with a single charge is referenced as “Whitlow,” from Whitlow et al., Protein Engineering 6(8):989-995 (1993). It should be noted that this linker was used for reducing aggregation and enhancing proteolytic stability in scFvs. Such charged scFv linkers can be used in any of the subject antibody formats disclosed herein that include scFvs (e.g., 1+1 Fab-scFv-Fc and 2+1 Fab2-scFv-Fc formats).

[0022] FIG. 7A and FIG. 7B depict a number of example domain linkers. In some embodiments, these linkers find use linking a single-chain Fv to an Fc chain. In some embodiments, these linkers may be combined in any orientation. For example, a GGGGS linker may be combined with a “lower half hinge” linker at the N-terminus or at the C-terminus.

[0023] FIG. 8 shows a particularly useful bispecific antibody backbone for the CD19×CD3 bispecific antibodies (bsAbs) of the disclosure. Although the backbone is described here in the context of the 1+1 Fab-scFv-Fc format, they can be adapted for use in other bispecific antibody formats.

[0024] FIG. 9 depicts various heterodimeric skew variant amino acid substitutions that can be used with the heterodimeric antibodies described herein.

[0025] FIG. 10A-FIG. 10E show the sequences of several heterodimeric CD19×CD3 bsAb backbones based on human IgG1, without the variable domains. Heterodimeric Fc backbone 1 is based on human IgG1 (356E/358M allotype), and includes the L368D/K370S skew variants and the Q295E/N384D/Q418E/N421D pI variants on a first heterodimeric Fc chain, the S364K/E357Q skew variants on a second heterodimeric Fc chain, and the E233P/L234V/L235A/G236del/S267K ablation variants on both chains. Heterodimeric Fc backbone 2 is based on human IgG1 (356E/358M allotype), and includes the L368D/K370S skew variants and the Q295E/N384D/Q418E/N421D pI variants on a first heterodimeric Fc chain, the S364K skew variant on a second heterodimeric Fc chain, and the E233P/L234V/L235A/G236del/S267K ablation variants on both chains. Heterodimeric Fc backbone 3 is based on human IgG1 (356E/358M allotype), and includes the L368E/K370S skew variants and the Q295E/N384D/Q418E/N421D pI variants on a first heterodimeric Fc chain, the S364K skew variant on a second heterodimeric Fc chain, and the E233P/L234V/L235A/G236del/S267K ablation variants on both chains. Heterodimeric Fc backbone 4 is based on human IgG1 (356E/358M allotype), and includes the K360E/Q362E/T411E skew variants and the Q295E/N384D/Q418E/N421D pI variants on a first heterodimeric Fc chain, the D401K skew variant on a second heterodimeric Fc chain, and the E233P/L234V/L235A/G236del/S267K ablation variants on both chains. Heterodimeric Fc backbone 5 is based on human IgG1 (356D/358L allotype), and includes the L368D/K370S skew variants and the Q295E/N384D/Q418E/N421D pI variants on a first heterodimeric Fc chain, the S364K/E357Q skew variants on a second heterodimeric Fc chain, and the E233P/L234V/L235A/G236del/S267K ablation variants on both chains. Heterodimeric Fc backbone 6 is based on human IgG1 (356E/358M allotype), and includes the L368D/K370S skew variants and the Q295E/N384D/Q418E/N421D pI variants on a first heterodimeric Fc chain, the S364K/E357Q skew variants on a second heterodimeric Fc chain, and the E233P/L234V/L235A/G236del/S267K ablation variants and N297A variant that removes glycosylation on both chains. Heterodimeric Fc backbone 7 is based on human IgG1 (356E/358M allotype), and includes the L368D/K370S skew variants and the Q295E/N384D/Q418E/N421D pI variants on a first heterodimeric Fc chain, the S364K/E357Q skew variants on a second heterodimeric Fc chain, and the E233P/L234V/L235A/G236del/S267K ablation variants and N297S variant that removes glycosylation on both chains. Heterodimeric Fc backbone 8 is based on human IgG4, and includes the L368D/K370S skew variants and the Q295E/N384D/Q418E/N421D pI variants on a first heterodimeric Fc chain, the S364K/E357Q skew variants on a second heterodimeric Fc chain, and the S228P (according to EU numbering, S241P in Kabat) variant that ablates Fab arm exchange (as is known in the art) on both chains. Heterodimeric Fc backbone 9 is based on human IgG2, and includes the L368D/K370S skew variants and the Q295E/N384D/Q418E/N421D pI variants on a first heterodimeric Fc chain, the S364K/E357Q skew variants on a second heterodimeric Fc chain. Heterodimeric Fc backbone 10 is based on human IgG2, and includes the L368D/K370S skew variants and the Q295E/N384D/Q418E/N421D pI variants on a first heterodimeric Fc chain, the S364K/E357Q skew variants on a second heterodimeric Fc chain, and the S267K ablation variant on both chains. Heterodimeric Fc backbone 11 is based on human IgG1 (356E/358M allotype), and includes the L368D/K370S skew variants and the Q295E/N384D/Q418E/N421D pI variants on a first heterodimeric Fc chain, the S364K/E357Q skew variants on a second heterodimeric Fc chain, and the E233P/L234V/L235A/G236del/S267K ablation variants and M428L/N434S Xtend variants on both chains. Heterodimeric Fc backbone 12 is based on human IgG1 (356E/358M allotype), and includes the L368D/K370S skew variants on a first heterodimeric Fc chain, the S364K/E357Q skew variants and P217R/P229R/N276K pI variants on a second heterodimeric Fc chain, and the E233P/L234V/L235A/G236del/S267K ablation variants on both chains. Heterodimeric Fc backbone 13 is based on human IgG1 (356E/358M allotype), and includes the T366W skew variant on a first heterodimeric Fc chain, the T366S/L368A/Y407V skew variants and H435R/Y436F purification variants on a second heterodimeric Fc chain, and the L234A/L235A/D265S ablation variants on both chains. Heterodimeric Fc backbone 14 is based on human IgG1 (356E/358M allotype), and includes the T366W skew variant on a first heterodimeric Fc chain, the T366S/L368A/Y407V skew variants and H435R/Y436F purification variants on a second heterodimeric Fc chain, and the L234A/L235A/D265S ablation variants and M252Y/S254T/T256E half-life extension variants on both chains. Heterodimeric Fc backbone 15 is based on human IgG1 (356D/358L allotype), and includes the L368D/K370S skew variants and the Q295E/N384D/Q418E/N421D pI variants on a first heterodimeric Fc chain, the S364K/E357Q skew variants on a second heterodimeric Fc chain, and the E233P/L234V/L235A/G236del/S267K ablation variants and M428L/N434S Xtend variants on both chains. Heterodimeric Fc backbone 16 is based on human IgG1 (356E/358M allotype), and includes the L368D/K370S skew variants and the Q295E/N384D/Q418E/N421D pI variants on a first heterodimeric Fc chain, the S364K/E357Q skew variants on a second heterodimeric Fc chain, and the E233P/L234V/L235A/G236del/S267K ablation variants and M428L/N434A Xtend variants on both chains. Heterodimeric Fc backbone 17 is based on human IgG1 (356D/358L allotype), and includes the L368D/K370S skew variants and the Q295E/N384D/Q418E/N421D pI variants on a first heterodimeric Fc chain, the S364K/E357Q skew variants on a second heterodimeric Fc chain, and the E233P/L234V/L235A/G236del/S267K ablation variants and M428L/N434A Xtend variants on both chains. Included within each of these backbones are sequences that are 90, 95, 98 and 99% identical (as defined herein) to the recited sequences, and/or contain from 1, 2, 3, 4, 5, 6, 7, 8, 9 or 10 additional amino acid substitutions (as compared to the “parent” of the Figure, which, as will be appreciated by those in the art, already contain a number of amino acid modifications as compared to the parental human IgG1 (or IgG2 or IgG4, depending on the backbone). That is, the recited backbones may contain additional amino acid modifications (generally amino acid substitutions) in addition or as an alternative to the skew, pI and ablation variants contained within the backbones of this Figure. Additionally, the backbones depicted herein may include deletion of the C-terminal glycine (G446_) and/or lysine (K447_). The C-terminal glycine and/or lysine deletion may be intentionally engineered to reduce heterogeneity or in the context of certain bispecific formats, such as the mAb-scFv format. Additionally, C-terminal glycine and/or lysine deletion may occur naturally for example during production and storage. As used herein, a “heterodimeric Fc chain” is also referred to as a “variant Fc domain.”

[0026] FIG. 11 depicts sequences for “CH1” that find use in embodiments of CD19×CD3 bsAbs.

[0027] FIG. 12 depicts sequences for “hinge” that find use in embodiments of CD19×CD3 bsAbs.

[0028] FIG. 13 depicts the constant domain of the cognate light chains that find use in the subject CD19×CD3 bsAbs that utilize a Fab binding domain.

[0029] FIG. 14 depicts the variable heavy and variable light chain sequences for CD19-OG (VH=SEQ ID NO: 151/VL=SEQ ID NO: 152), an example CD19 binding domain. CDRs are underlined and slashes indicate the border(s) between the variable regions and constant domain. As noted herein and is true for every sequence herein containing CDRs, the exact identification of the CDR locations may be slightly different depending on the numbering used as is shown in Table 1, and thus included herein are not only the CDRs that are underlined but also CDRs included within the VH and VL domains using other numbering systems. Furthermore, as for all the sequences in the Figures, these VH and VL sequences can be used either in a scFv format or in a Fab format.

[0030] FIG. 15 depicts the variable heavy and variable light chain sequences for CD19-NEW (VH=SEQ ID NO: 7/VL=SEQ ID NO: 8), an example CD19 binding domain that is a re-engineered variant of CD19-OG. CDRs are underlined and slashes indicate the border(s) between the variable regions and constant domain. As noted herein and is true for every sequence herein containing CDRs, the exact identification of the CDR locations may be slightly different depending on the numbering used as is shown in Table 1, and thus included herein are not only the CDRs that are underlined but also CDRs included within the VH and VL domains using other numbering systems. Furthermore, as for all the sequences in the Figures, these VH and VL sequences can be used either in a scFv format or in a Fab format.

[0031] FIG. 16A-FIG. 16F depict the variable heavy and variable light chain sequences for illustrative CD3 binding domains which find use in the CD19×CD3 bsAbs of the disclosure. The CDRs are underlined, the scFv linker is double underlined (in the sequences, the scFv linker is a positively charged scFv (GKPGS)₄ linker (SEQ ID NO: 36), although as will be appreciated by those in the art, this linker can be replaced by other linkers, including uncharged or negatively charged linkers, some of which are depicted in FIG. 6), and the slashes indicate the border(s) of the variable domains. In addition, the naming convention illustrates the orientation of the scFv from N- to C-terminus. As noted herein and is true for every sequence herein containing CDRs, the exact identification of the CDR locations may be slightly different depending on the numbering used as is shown in Table 1, and thus included herein are not only the CDRs that are underlined but also CDRs included within the VH and VL domains using other numbering systems. Furthermore, as for all the sequences in the Figures, these VH and VL sequences can be used either in a scFv format or in a Fab format.

[0032] FIG. 17A-FIG. 17J depict the variable heavy and variable light chain sequences for example CD3 binding domains re-engineered to improve stability while retaining an affinity ladder. The CDRs are underlined, the scFv linker is double underlined (in the sequences, the scFv linker is a positively charged scFv (GKPGS)₄ linker (SEQ ID NO: 36), although as will be appreciated by those in the art, this linker can be replaced by other linkers, including uncharged or negatively charged linkers, some of which are depicted in FIG. 6), and the slashes indicate the border(s) of the variable domains. In addition, the naming convention illustrates the orientation of the scFv from N- to C-terminus. As noted herein and is true for every sequence herein containing CDRs, the exact identification of the CDR locations may be slightly different depending on the numbering used as is shown in Table 1, and thus included herein are not only the CDRs that are underlined but also CDRs included within the VH and VL domains using other numbering systems. Furthermore, as for all the sequences in the Figures, these VH and VL sequences can be used either in a scFv format or in a Fab format.

[0033] FIG. 18A-FIG. 18N depict bispecific formats of the present disclosure. FIG. 18A depicts the “1+1 Fab-scFv-Fc” format, with a first Fab arm binding a first antigen and a second scFv arm binding second antigen. The 1+1 Fab-scFv-Fc format comprises a first monomer comprising a first heavy chain variable region (VH1) covalently attached to the N-terminus of a first heterodimeric Fc backbone (optionally via a linker), a second monomer comprising a single-chain Fv covalently attached to the N-terminus of a second corresponding heterodimeric Fc backbone (optionally via a linker), and a third monomer comprising a light chain variable region covalently to a light chain constant domain, wherein the light chain variable region is complementary to the VH1. FIG. 18B depicts the “2+1 Fab2-scFv-Fc” format, with a first Fab arm and a second Fab-scFv arm, wherein the Fab binds a first antigen and the scFv binds second antigen. The 2+1 Fab2-scFv-Fc format comprises a first monomer comprising a first heavy chain variable region (VH1) covalently attached to the N-terminus of a first heterodimeric Fc backbone (optionally via a linker), a second monomer comprising the VH1 covalently attached (optionally via a linker) to a single-chain Fv covalently attached (optionally via a linker) to the N-terminus of a second corresponding heterodimeric Fc backbone, and a third monomer comprising a light chain variable region covalently to a light chain constant domain, wherein the light chain variable region is complementary to the VH1. FIG. 18C depicts the “1+1 Common Light Chain” or “1+1 CLC” format, with a first Fc comprising a first Fab arm binding a first antigen and a second Fc comprising a second Fab arm binding second antigen. The 1+1 CLC format comprises a first monomer comprising VH1-CH1-hinge-CH2-CH3, a second monomer comprising VH2-CH1-hinge-CH2-CH3, and a third monomer comprising VL-CL. The VL pairs with the VH1 to form a binding domain with a first antigen binding specificity; and the VL pairs with the VH2 to form a binding domain with a second antigen binding specificity. FIG. 18D depicts the “2+1 Common Light Chain” or “2+1 CLC” format, with a first Fc comprising 2 Fab arms each binding a first antigen and a second Fc comprising 1 Fab arm binding a second antigen. The 2+1 CLC format comprises a first monomer comprising VH1-CH1-hinge-VH1-CH1-hinge-CH2-CH3, a second monomer comprising VH2-CH1-hinge-CH2-CH3, and a third monomer comprising VL-CL. The VL pairs with the first and second VH1 to form binding domains with a first antigen binding specificity; and the VL pairs with the VH2 to form a binding domain with a second antigen binding specificity. FIG. 18E depicts the “2+1 mAb-scFv” format, with a first Fc comprising an N-terminal Fab arm binding a first antigen and a second Fc comprising an N-terminal Fab arm binding the first antigen and a C-terminal scFv binding a second antigen. The 2+1 mAb-scFv format comprises a first monomer comprising VH1-CH1-hinge-CH2-CH3, a second monomer comprising VH1-CH1-hinge-CH2-CH3-scFv, and a third monomer comprising VL-CL. The VL pairs with the first and second VH1 to form binding domains with binding specificity for the first antigen. FIG. 18F depicts the “2+1 mAb-scFv” format which comprises a first monomer comprising from N-terminal to C-terminal VH1-CH1-linker-VH2-CH1-hinge-CH2-CH3 wherein CH2-CH3 is a first heterodimeric Fc domain; a second monomer comprising from N-terminal to C-terminal scFv-linker-CH2-CH3 wherein CH2-CH3 is a second heterodimeric Fc domain complementary to the first heterodimeric Fc domain and wherein the scFv has a first antigen specificity; and a third monomer that is a common light chain comprising from N-terminal to C-terminal VL-CL wherein the VL pairs with VH1 and VH2 of the first monomer to form two antigen binding domains each having a specificity for a second antigen binding domain. Additional bispecific formats include dual scFv (FIG. 18G), one-arm scFv-mAb (FIG. 18H), scFv-mAb (FIG. 18I), bispecific mAb (FIG. 18J), one-arm central-scFv (FIG. 18K), mAb-Fv (FIG. 18L), central-Fv (FIG. 18M), and trident (FIG. 18N).

[0034] FIG. 19A-FIG. 19C depict the sequences for illustrative CD19×CD3 bsAbs in the 1+1 Fab-scFv-Fc format. It should be noted that any other suitable backbones including those depicted in FIG. 10A-FIG. 10E may be used. CDRs are underlined and slashes indicate the border(s) between the variable regions and other domains. It should be noted that the CD19×CD3 bsAbs can utilize variable region, Fc region, and constant domain sequences that are 90, 95, 98 and 99% identical (as defined herein), and/or contain from 1, 2, 3, 4, 5, 6, 7, 8, 9 or 10 amino acid substitutions. In addition, each sequence outlined herein can include or exclude the M428L/N434S, M428L/N434A, or M252Y/S254T/T256E variants in one or preferably both Fc domains, which including the variants results in longer half-life in serum.

[0035] FIG. 20A-FIG. 20AD depict the sequences for illustrative CD19×CD3 bsAbs in the 2+1 Fab2-scFv-Fc format. It should be noted that any other suitable backbones including those depicted in FIG. 10A-FIG. 10E may be used. CDRs are underlined and slashes indicate the border(s) between the variable regions and other domains. It should be noted that the CD19×CD3 bsAbs can utilize variable region, Fc region, and constant domain sequences that are 90, 95, 98 and 99% identical (as defined herein), and/or contain from 1, 2, 3, 4, 5, 6, 7, 8, 9 or 10 amino acid substitutions. In addition, each sequence outlined herein can include or exclude the M428L/N434S, M428L/N434A, or M252Y/S254T/T256E variants in one or preferably both Fc domains, which including the variants results in longer half-life in serum.

[0036] FIG. 21 depicts in vitro depletion of CD19⁺ Ramos cells by CD19×CD3 bsAbs (in 1+1 or 2+1 formats with either high or intermediate affinity CD3 binding domains).

[0037] FIG. 22 depicts in vivo depletion of peripheral B cells in cynomolgus monkeys dosed with CD19×CD3 bsAbs (in 1+1 or 2+1 formats with either high or intermediate affinity CD3 binding domains).

[0038] FIG. 23 depicts in vivo depletion of peripheral B cells in cynomolgus monkeys dosed with CD19×CD3 bsAbs (in 1+1 or 2+1 formats with either high or intermediate affinity CD3 binding domains) with log₁₀ y-axis.

[0039] FIG. 24 depicts peripheral T cell activation in cynomolgus monkeys dosed with CD19×CD3 bsAbs (in 1+1 or 2+1 formats with either high or intermediate affinity CD3 binding domains).

[0040] FIG. 25A depicts in vivo depletion of bone marrow B cell and FIG. 25B depicts lymph node B cell in cynomolgus monkeys dosed with CD19×CD3 bsAbs (in 1+1 or 2+1 formats with either high or intermediate affinity CD3 binding domains).

[0041] FIG. 26 depicts serum concentration of CD19×CD3 bsAbs (in 1+1 or 2+1 formats with either high or intermediate affinity CD3 binding domains) over time in cynomolgus monkeys.

[0042] FIG. 27A depicts B cell depletion by XENP26982 and FIG. 27B serum concentration of XENP26982 in cynomolgus monkeys over time.

[0043] FIG. 28A and FIG. 28B depict comparison of CD19-OG and re-engineered CD19-NEW binding domains.

[0044] FIG. 29 depicts improvements in re-engineered CD19-NEW binding domain relative to CD19-OG.

[0045] FIG. 30 depicts affinity of original CD3 binding domains and CD3 binding domains re-engineered with disulfide bridges and deamidation fix.

[0046] FIG. 31 depicts induction of CD19⁺ Ramos cell kill by CD19×CD3 bsAbs with CD19-OG and CD19-NEW binding domains (in 1+1 and 2+1 formats with varied CD3 affinity).

[0047] FIG. 32A-FIG. 32D depict induction of T cell activation by CD19×CD3 bsAbs having original and re-engineered CD3 binding domains in the presence of human PBMC (FIG. 32A), cyno PBMC (FIG. 32B), and CD19+ Ramos cell kill (FIG. 32C).

[0048] FIG. 33 depicts induction of CD19+ Ramos cell kill, T cell activation, and IFNγ release by CD19×CD3 bsAbs with CD19-OG and CD19-NEW binding domains and original and re-engineered CD3 binding domains (in 1+1 and 2+1 formats).

[0049] FIG. 34 depicts induction of human B cell kill by CD19×CD3 bsAbs with CD19-NEW and the stability and affinity-enhanced CD3 binding domains.

[0050] FIG. 35 depicts the average pharmacokinetics at various relative doses of various CD19×CD3 bsAbs (along with ADA status), non-compartmental analysis.

[0051] FIG. 36 depicts depletion of cyno B cells in peripheral blood over time after dosing with various CD19×CD3 bsAbs at indicated relative doses. Certain of the points denoted 0.01 are 0 B cells per μL as shown in FIG. 41.

[0052] FIG. 37 depicts depletion of cyno B cells among lymphocytes over time after dosing with various CD19×CD3 bsAbs at indicated relative doses.

[0053] FIG. 38 depicts depletion of cyno B cells in lymph nodes over time after dosing with various CD19×CD3 bsAbs at indicated relative doses.

[0054] FIG. 39 depicts depletion of cyno B cells among bone marrow lymphocytes over time after dosing with various CD19×CD3 bsAbs at indicated relative doses.

[0055] FIG. 40 depicts depletion of B cell over time in all cynomolgus monkeys dosed with XENP49657 at 1× (top graph) or 3× dose level (bottom graph).

[0056] FIG. 41 depicts B cell depletion in periphery, bone marrow, and lymph nodes of cynomolgus monkeys dosed with 1× or 3× dose XENP49657. * indicates point is peripheral B cells <1 B cell per μL and +indicates data point is 0 B cells per μL. B cells were gated as CD45+CD2−/lowCD20+CD4−CD8a−CD159a−

[0057] FIG. 42 depicts plasma deletion in the bone marrow of cynomolgus monkeys dosed with 1× (top graph) or 3× dose (bottom graph) XENP49657. Plasma cells defined as SSlow/CD45+CD2−/lowCD20−/lowCD4−CD8a−CD159a−CD27−CD38high.

[0058] FIG. 43 depicts reduction in serum immunoglobulin in cynomolgus monkeys dosed with 1× or 3×XENP49657 that were not impacted by ADA.

[0059] FIG. 44 depicts affinity for human and cyno CD19 (apparent dissociation constant to account for bivalent binding, except in the case of 49653 which has monovalent CD19 binding), human and cyno CD3, and melting temperatures of CD19×CD3 bsAbs having the old CD3 and new stability-enhanced CD3 binding domains.

[0060] FIG. 45 depicts depletion of bone marrow plasma cells over time in cynomolgus monkeys dosed with 1× or 3× dose XENP49657.

[0061] FIG. 46 depicts pharmacokinetics of 1× and 3× intravenous dose XENP49657 in cynomolgus monkeys, half life ˜15 days.

[0062] FIG. 47 depicts pharmacokinetics of 3× subcutaneous dose XENP49657 in cynomolgus monkeys, half-life ˜15 days.

[0063] FIG. 48 depicts depletion of B cell over time in cynomolgus monkeys dosed subcutaneously with XENP49657 3× dose level.

[0064] FIG. 49 depicts deep B-depletion sustained for at least 42 days in cynomolgus monkeys dosed intravenously with XENP49657 at 3× dose level.

[0065] FIG. 50 depicts depletion of CD19+ plasma cells in bone marrow in cynomolgus monkeys dosed with CD19×CD3 bsAbs.

[0066] FIG. 51 depicts melting temperature of bispecific antibodies in the 2+1 Fab2-scFv-Fc format having original CD3 binding domains and CD3 binding domains re-engineered with disulfide bridges (as denoted by S-S).

[0067] FIG. 52 depicts affinity of original CD3 binding domains and CD3 binding domains re-engineered with disulfide bridges (as denoted by S-S) and deamidation fix (in the context of 2+1 Fab2-scFv-Fc bispecific antibodies).

[0068] FIG. 53 depicts induction of B cell killing (top panel), IFNγ secretion (middle panel), and IL-6 secretion (bottom panel) by XENP49657 in human PBMCs from healthy donors (average of 4 donors) vs. donors with rheumatoid arthritis (average of 7 donors).

[0069] FIG. 54 depicts induction of A) B cell killing, B) IFNγ secretion, and C) IL-6 secretion by XENP49657 in human PBMCs from healthy donors (average of 4 donors) vs. donors with systemic lupus erythematosus (average of 8 donors). depicts induction of A) B cell killing, B) IFNγ secretion, and C) IL-6 secretion by XENP49657 in human PBMCs from healthy donors (average of 4 donors) vs. donors with systemic lupus erythematosus (average of 8 donors).

### DETAILED DESCRIPTION

### I. Overview

[0070] Disclosed herein are anti-CD3 and anti-CD19 bispecific antigen binding molecules comprising an anti-CD19 antigen binding domain and an anti-CD3 antigen binding domain, such that the binding molecules bind to the extracellular domains of human CD19 and CD3.

[0071] In some variations, the anti-CD19 antigen binding domain, anti-CD3 antigen binding domain, or both have improved stability while maintaining binding affinity. For example, anti-CD3 antigen binding domain variants of the bispecific antigen binding molecules are engineered to fix deamidation and incorporate disulfide bridges, while maintaining affinity and improved stability of the anti-CD3 antigen binding domain. The anti-CD3 antigen binding domain can have binding affinity similar to a non-engineered anti-CD3 antigen binding molecule. Likewise, the anti-CD19 antigen binding domain of the bispecific antigen binding molecules can be, for example, re-humanized and demonstrate enhanced stability, such as a +7° C. improved Tₘ (FIG. 29). The herein disclosed anti-CD3 and anti-CD19 bispecific antigen binding molecules exhibit comparable CD19+ Ramos cell killing and T-cell activation compared to the reference bispecific molecules that lack the sequence changes that mediate the improvements described herein.

[0072] The disclosed compositions and methods may be understood more readily by reference to the following detailed description taken in connection with the accompanying figures, which form a part of this disclosure. It is to be understood that the disclosed compositions and methods are not limited to the specific compositions and methods described and/or shown herein, and that the terminology used herein is for the purpose of describing particular embodiments by way of example only and is not intended to be limiting of the claimed compositions and methods.

[0073] Unless specifically stated otherwise, any description as to a possible mechanism or mode of action or reason for improvement is meant to be illustrative only, and the disclosed compositions and methods are not to be constrained by the correctness or incorrectness of any such suggested mechanism or mode of action or reason for improvement.

[0074] Throughout this text, the descriptions refer to compositions and methods of using said compositions. Where the disclosure describes or claims a feature or embodiment associated with a composition, such a feature or embodiment is equally applicable to the methods of using said composition. Likewise, where the disclosure describes or claims a feature or embodiment associated with a method of using a composition, such a feature or embodiment is equally applicable to the composition.

[0075] Where a range of numerical values is recited or established herein, the range includes the endpoints thereof and all the individual integers and fractions within the range, and also includes each of the narrower ranges therein formed by all the various possible combinations of those endpoints and internal integers and fractions to form subgroups of the larger group of values within the stated range to the same extent as if each of those narrower ranges was explicitly recited. Where a range of numerical values is stated herein as being greater than a stated value, the range is nevertheless finite and is bounded on its upper end by a value that is operable within the context of the herein disclosure. Where a range of numerical values is stated herein as being less than a stated value, the range is nevertheless bounded on its lower end by a non-zero value. It is not intended that the scope of the compositions and methods be limited to the specific values recited when defining a range. All ranges are inclusive and combinable.

[0076] When values are expressed as approximations, by use of the antecedent “about,” it will be understood that the particular value forms another embodiment. Reference to a particular numerical value includes at least that particular value, unless the context clearly dictates otherwise.

[0077] It is to be appreciated that certain features of the disclosed compositions and methods which are, for clarity, described herein in the context of separate embodiments, may also be provided in combination in a single embodiment. Conversely, various features of the disclosed compositions and methods that are, for brevity, described in the context of a single embodiment, may also be provided separately or in any subcombination.

[0078] The disclosures of each patent, patent application, and publication cited or described in this document are hereby incorporated herein by reference, in its entirety.

### III. Definitions

[0079] As used herein, the singular forms “a,” “an,” and “the” include the plural.

[0080] When a list is presented, unless stated otherwise, it is to be understood that each individual element of that list, and every combination of that list, is a separate embodiment. For example, a list of embodiments presented as “A, B, or C” is to be interpreted as including the embodiments: “A;” “B;” “C;” “A or B;” “A or C;” “B or C;” or “A, B, or C.”

[0081] Various terms relating to aspects of the description are used throughout the specification and claims. Such terms are to be given their ordinary meaning in the art unless otherwise indicated. Other specifically defined terms are to be construed in a manner consistent with the definitions provided herein.

[0082] The term “comprising” is intended to include examples encompassed by the terms “consisting essentially of” and “consisting of”; similarly, the term “consisting essentially of” is intended to include examples encompassed by the term “consisting of.”

[0083] “Antigen binding molecule” refers to a protein or peptide that specifically binds to an antigenic determinant. Examples of antigen binding molecules are immunoglobulin and derivatives or fragments thereof, e.g., Fab, scFv, 1+1 Fab-scFv-Fc, 2+1 Fab2-scFv-Fc, 1+1 Common Light Chain, 2+1 Common Light Chain, 2+1 mAb-scFv, 2+1 stackFab2-scFv-Fc, Dual scFv, One-arm scFv-mAb, scFv-mAb, Bispecific mAb, One-arm central-scFv, mAb-Fv, central-Fv, and Trident. Additional examples of antigen binding molecules are receptors and ligands.

[0084] “Binding subunit” as used herein refers to a protein subunit that comprises three “Complementarity Determining Regions” (CDRs). More than one binding subunit can be combined to form an antigen binding domain, which has specificity to an antigenic determinant. Multiple binding units may be linked directly or indirectly. A binding subunit can be a variable heavy domain or a variable light domain; that is, a variable heavy binding subunit and a variable light binding subunit.

[0085] “Antigen binding domain” or “ABD” herein is meant the part of an antigen binding molecule which confers its binding specificity to an antigenic determinant. Herein, the “antigen binding domain” refers to a set of six “Complementarity Determining Regions” (CDRs) that, when present as part of a polypeptide sequence, specifically binds a target antigen as discussed herein. The antigen binding domain can include a first binding subunit comprising three CDRs, and a second binding subunit comprising three CDRs. In some variations, the first binding subunit can correspond to a first set of variable heavy CDRs (vhCDRs or VHCDRs), while the second binding subunit can correspond to a second set of variable light CDRs (vlCDRs or VLCDRs). For example, as is known in the art, CDRs can be present as a first set of variable heavy CDRs and a second set of variable light CDRs, each comprising three CDRs: vhCDR1, vhCDR2, vhCDR3 for the heavy chain and vlCDR1, vlCDR2 and vlCDR3 for the light chain. The CDRs can be present in the variable heavy and variable light domains, respectively. In an antigen binding domain, when a first binding subunit is a variable heavy domain and a second binding subunit is a variable light domain, together the antigen binding domain can form an Fv region. In a “Fab” format, the set of 6 CDRs are contributed by two different polypeptide sequences, the variable heavy domain (vh or VH; containing the vhCDR1, vhCDR2 and vhCDR3) and the variable light domain (vl or VL; containing the vlCDR1, vlCDR2 and vlCDR3), with the C-terminus of the vh domain being attached to the N-terminus of the CHI domain of the heavy chain and the C-terminus of the vl domain being attached to the N-terminus of the constant light domain (and thus forming the light chain). In a scFv format, the vh and vl domains are covalently attached, generally through the use of a linker (a “scFv linker”) as outlined herein, into a single polypeptide sequence, which can be either (starting from the N-terminus) vh-linker-vl or vl-linker-vh (including optional domain linkers on each side. In general, the C-terminus of the scFv domain is attached to the N-terminus of the hinge in the second monomer.

TABLE 1
CDR Positions

| | Kabat + | | | | | | |
|---|---|---|---|---|---|---|---|
| | Chothia | IMGT | Kabat | AbM | Chothia | Contact | Xencor |
| vhCDR1 | 26-35 | 27-38 | 31-35 | 26-35 | 26-32 | 30-35 | 27-35 |
| vhCDR2 | 50-65 | 56-65 | 50-65 | 50-58 | 52-56 | 47-58 | 54-61 |
| vhCDR3 | 95-102 | 105-117 | 95-102 | 95-102 | 95-102 | 93-101 | 103-116 |
| vlCDR1 | 24-34 | 27-38 | 24-34 | 24-34 | 24-34 | 30-36 | 27-38 |
| vlCDR2 | 50-56 | 56-65 | 50-56 | 50-56 | 50-56 | 46-55 | 56-62 |
| vlCDR3 | 89-97 | 105-117 | 89-97 | 89-97 | 89-97 | 89-96 | 97-105 |

[0086] The term “antibody,” and like terms are a category of antigen binding molecule. In a broad sense antibody refers to immunoglobulin molecules including, monoclonal antibodies, antibody fragments, bispecific or multispecific antibodies, dimeric, tetrameric or multimeric antibodies, and single chain antibodies. Antibody formats include, but are not limited to Fab, scFv, 1+1 Fab-scFv-Fc, 2+1 Fab2-scFv-Fc, 1+1 Common Light Chain, 2+1 Common Light Chain, 2+1 mAb-scFv, 2+1 stackFab2-scFv-Fc, Dual scFv, One-arm scFv-mAb, scFv-mAb, Bispecific mAb, One-arm central-scFv, mAb-Fv, central-Fv, and Trident. Antibodies of the invention are generally derived or use components from human IgG, which has four isotypes IgG1, IgG2, IgG3 and IgG4. Of particular use herein are heavy chain constant regions from IgG1, IgG2 and IgG4, with IgG1 finding particular use in many embodiments. Antibody light chains of any vertebrate species can be assigned to one of two clearly distinct types, namely kappa (κ) and lambda (λ), based on the amino acid sequences of their constant domains.

[0087] “Bispecific” and “bi-specific” refer to the characteristic of a molecule that binds two different antigens or epitopes at the same time. A “bispecific antigen binding molecule,” or a “bispecific antibody” refers to a protein comprising at least two antigen-binding domains that are capable of simultaneously binding two different antigens (targets). Bispecific antibodies (also referred to as “bsAbs”) can be heterodimeric antibodies. Bispecific antigen binding molecules can, for example, be used to form a link between T cells and target cells, leading to the activation of T cells and generation of an immunological synapse. As shown herein, bispecific antigen binding constructs can be bivalent and bispecific (e.g. containing two antigen binding domains, each one binding a different target), or trivalent and bispecific (e.g. where the construct includes three antigen binding domains, two of which bind to one target (e.g. CD19) and one ABD that binds a separate target (e.g. CD3).

[0088] By “Fc” or “Fc region” or “Fc domain” as used herein is meant the polypeptide comprising the CH2-CH3 domains of an IgG molecule, and in some cases, inclusive of the hinge. In EU numbering for human IgG1, the CH2-CH3 domain comprises amino acids 231 to 447, and the hinge is 216 to 230. Thus, the definition of “Fc domain” includes both amino acids 231-447 (CH2-CH3) or 216-447 (hinge-CH2-CH3), or fragments thereof. An “Fc fragment” in this context may contain fewer amino acids from either or both of the N- and C-termini but still retains the ability to form a dimer with another Fc domain or Fc fragment as can be detected using standard methods, generally based on size (e.g., non-denaturing chromatography, size exclusion chromatography, etc.) Human IgG Fc domains are of particular use in the methods provided herein, and can be the Fc domain from human IgG1, IgG2 or IgG4. Two Fc domains can self-assemble to form the full constant region or backbone.

[0089] By “heavy chain constant region” herein is meant the CH1-hinge-CH2-CH3 portion of an antibody (or fragments thereof), excluding the variable heavy domain; in EU numbering of human IgG1 this is amino acids 118-447. By “heavy chain constant region fragment” herein is meant a heavy chain constant region that contains fewer amino acids from either or both of the N- and C-termini but still retains the ability to form a dimer with another heavy chain constant region, and more particularly the ability to form a dimeric Fc domain.

[0090] “Heterodimeric antibody” or “heterodimeric domain,” means that the protein has at least two distinct sequences that associate to form a domain. For example, at least distinct two Fc sequences can assemble into a heterodimeric Fc domain, which can further comprise at least two Fv regions.

[0091] “Antibody fragment” refers to a portion of an immunoglobulin molecule that retains the specific antigen binding properties of the parental full length antibody (i.e. antigen-binding fragment thereof). By way of example and not limitation, antibody fragments comprise two binding domains, wherein each binding domain comprises a CDR1, a CDR2, and a CDR3. In some embodiments, the first binding domain can be a heavy chain comprising heavy chain complementarity determining regions (HCDR) 1, 2, and 3, and the second binding domain can be a light chain comprising complementarity determining regions (LCDR) 1, 2, and 3. Other example antibody fragments comprise a heavy chain variable region (VH) and a light chain variable region (VL). By “Fab” or “Fab region” as used herein is meant the polypeptide that comprises the VH, CH1, VL, and CL immunoglobulin domains. By “Fv” or “Fv fragment” or “Fv region” as used herein is meant a polypeptide that comprises the VL and VH domains of a single antibody. For example, antibody fragments include without limitation: a Fab fragment, a monovalent fragment consisting of the VL, VH, constant light (CL), and constant heavy 1 (CH1) domains; a F(ab)₂ fragment, a bivalent fragment comprising two Fab fragments linked by a disulfide bridge at the hinge region; and a Fv fragment consisting of the VL and VH domains of a single arm of an antibody. Further, VH and VL domains can be engineered and linked together via a synthetic linker to form various types of single chain antibody designs where the VH/VL domains pair intramolecularly, or intermolecularly in those cases when the VH and VL domains are expressed by separate single chain antibody constructs, to form a monovalent antigen binding site, such as single chain Fv (scFv) or diabody. These antibody fragments are obtained using techniques well known to those of skill in the art, and the fragments are screened for utility in the same manner as are full length antibodies.

[0092] An antigen binding molecule, antigen binding region, or antibody binding domain can have up to four “framework” regions (FRs) flanking CDRs in each binding subunit. In some variations, FRs alternate with three CDRs, in the sequence FR1, CDR1, FR2, CDR2, FR3, CDR3, FR4 (from amino to carboxy termini). If the binding subunit is a heavy chain variable region (VH), the three CDRs are identified as HCDR1, HCDR2, HCDR3 and the FRs are VHFR1, VHFR2, VHFR3 and VHFR4, such that the variable heavy domain comprises, from N- to C-terminal, VHFR1-VHCDR1-VIFR2-VHCDR2-VIFR3-VHCDR3-VHFR4. If the binding subunit is a light chain variable region (VL), the three CDRs are identified as LCDR1, LCDR2, LCDR3, the FRs are VLFR1, VLFR2, VLFR3 and VLFR4, such that the variable heavy domain comprises, from N- to C-terminal, VLFR1-VLCDR1-VLFR2-VLCDR2-VLFR3-VLCDR3-VLFR4. The location and size of the CDRs are defined based on rules which identify regions of sequence variability within the immunoglobulin variable regions (Wu and Kabat J Exp Med 132:211-50, 1970; Kabat et al. Sequences of Proteins of Immunological Interest, 5th Ed. Public Health Service, National Institutes of Health, Bethesda, Md., 1991).

[0093] “Humanized antibody” refers to an antibody in which the antigen binding sites are derived from non-human species and the framework regions are derived from human immunoglobulin sequences. Humanized antibodies may include substitutions in the framework regions so that the framework may not be an exact copy of expressed human immunoglobulin or germline gene sequences. If the antibody contains a constant region, the constant region is also derived from sequences of human origin. Methods of antibody humanization include, for example, string content optimization as described in U.S. Pat. No. 7,657,380.

[0094] “Human antibody” refers to an antibody having heavy and light chain variable regions in which both the framework and the antigen binding sites are derived from sequences of human origin. If the antibody contains a constant region, the constant region also is derived from sequences of human origin. A human antibody comprises heavy or light chain variable regions that are “derived from” sequences of human origin if the variable regions of the antibody are obtained from a system that uses human germline immunoglobulin or rearranged immunoglobulin genes. Such systems include human immunoglobulin gene libraries displayed on phage, and transgenic non-human animals such as mice or rats carrying human immunoglobulin loci. “Human antibody” may contain amino acid differences when compared to the human germline or rearranged immunoglobulin sequences due to, for example, naturally occurring somatic mutations or intentional introduction of substitutions in the framework or antigen binding sites. Typically, a “human antibody” is at least about 80%, 81%, 82%, 83%, 84%, 85%, 86%, 87%, 88%, 89%, 90%, 91%, 92%, 93%, 94%, 95%, 96%, 97%, 98%, 99%, or 100% identical in amino acid sequence to an amino acid sequence encoded by a human germline or rearranged immunoglobulin gene.

[0095] The terms “bind,” “binding,” and the like, refer to the ability of the disclosed antigen binding molecules to preferentially bind to its target (e.g. CD3 in the case of anti-CD3 antigen binding molecules or CD19 in the case of anti-CD19 antigen binding molecules) without preferentially binding other molecules in a sample containing a mixed population of molecules. Antigen binding molecules that immunospecifically bind, for example, CD3 are substantially free of other antigen binding molecules having different antigenic specificities (e.g., an anti-CD3 antigen binding molecule is substantially free of antigen binding molecules that specifically bind antigens other than CD3). Antigen binding molecules that immunospecifically bind, for example, CD3 and CD19, however, can have cross-reactivity to other antigens, such as orthologs of human CD3 and CD19, including Macacafascicularis (cynomolgus monkey) CD3 and CD19, respectively. The antigen binding molecules disclosed herein are able to immunospecifically bind both naturally-produced human CD3 and CD19 and to CD3 and CD19 which is recombinantly produced in mammalian or prokaryotic cells.

[0096] By “target antigen” as used herein is meant the molecule that is bound specifically by the antigen binding domain comprising the variable regions of a given antibody. As discussed herein, in the target antigens are CD19 and CD3.

[0097] The strength, or affinity, of specific binding can be expressed in terms of dissociation constant (K_{D}) of the interaction, wherein a smaller K_{D} represents greater affinity and a larger KD represents lower affinity. Binding properties can be determined by methods well known in the art such as bio-layer interferometry and surface plasmon resonance based methods. One such method entails measuring the rates of antigen-binding site/antigen or receptor/ligand complex association and dissociation, wherein rates depend on the concentration of the complex partners, the affinity of the interaction, and geometric parameters that equally influence the rate in both directions. Thus, both the association rate (ka) and the dissociation rate (kd) can be determined, and the ratio of kd/ka is equal to the dissociation constant K_{D} (See Nature 361:186-187 (1993) and Davies et al. (1990) Annual Rev Biochem 59:439-473).

[0098] Specific binding for a particular molecule or an epitope can be exhibited, for example, by an antigen binding molecule having a K_{D} for an antigen or epitope of at least about 10⁻⁴ M, at least about 10⁻⁵ M, at least about 10⁻⁶ M, at least about 10⁻⁷ M, at least about 10⁻⁸ M, at least about 10⁻⁹ M, alternatively at least about 10⁻¹⁰M, at least about 10⁻¹¹ M, at least about 10⁻¹² M, or lesser. Typically, an antigen binding molecule that specifically binds an antigen will have a K_{D} that is 20-, 50-, 100-, 500-, 1000-, 5,000-, 10,000- or more times greater for a control molecule relative to the antigen or epitope.

[0099] Also, specific binding for a particular molecule or an epitope can be exhibited, for example, by an antigen binding molecule having a ka or association rate for an antigen or epitope of at least 20-, 50-, 100-, 500-, 1000-, 5,000-, 10,000- or more times greater for the epitope relative to a control.

[0100] By “epitope” is herein meant a determinant that interacts with a specific antigen binding domain, for example variable region of an antibody molecule, known as a paratope. Epitopes are groupings of molecules such as amino acids or sugar side chains and usually have specific structural characteristics, as well as specific charge characteristics. A single molecule may have more than one epitope. The epitope may comprise amino acid residues directly involved in the binding (also called immunodominant component of the epitope) and other amino acid residues, which are not directly involved in the binding, such as amino acid residues which are effectively blocked by the specifically antigen binding peptide; in other words, the amino acid residue is within the footprint of the specifically antigen binding peptide. Epitopes may be either conformational or linear. A conformational epitope is produced by spatially juxtaposed amino acids from different segments of the linear polypeptide chain. A linear epitope is one produced by adjacent amino acid residues in a polypeptide chain. Conformational and nonconformational epitopes may be distinguished in that the binding to the former but not the latter is lost in the presence of denaturing solvents. An epitope typically includes at least 3, and more usually, at least 5 or 8-10 amino acids in a unique spatial conformation. Antigen binding molecules that recognize the same epitope can be verified in a simple immunoassay showing the ability of one antigen binding molecule to block the binding of another antigen binding molecule to a target antigen, for example “binning.” As outlined below, the invention not only includes the enumerated antigen binding molecules and antigen binding domains herein, but those that compete for binding with the epitopes bound by the enumerated antigen binding molecules or antigen binding domains.

[0101] The term “CD3” refers to cluster of differentiation 3 protein complex or CD3 chains that form the CD3 complex, such as CD3 gamma, CD3 delta, CD3 zeta, and CD3 epsilon. In particular variations, CD3 refers to the human CD3-epsilon polypeptide of SEQ ID NO: 37. Example CD3 sequences to which the herein disclosed CD3 antigen binding molecules can bind include, for example, SEQ ID NOs: 37-42, which include human, mouse, and cynomolgus CD3 sequences (FIG. 1).

[0102] The term “CD19” refers to Cluster of Differentiation 19, which includes a transmembrane domain, a cytoplasmic C-terminus, and extracellular N-terminus. The herein disclosed CD19 antigen binding molecules can bind the extracellular N-terminus of CD19, which has two C2-type Ig-like domains divided by a smaller potential disulfide linked non-Ig-like domain. Example CD19 sequences to which the herein disclosed CD19 antigen binding molecules can bind include, for example, SEQ ID NOs: 43-48, which include human, mouse, and cynomolgus CD19 sequences (FIG. 1).

[0103] “Variant” refers to a polypeptide or a polynucleotide that differs from a reference polypeptide or a reference polynucleotide by one or more modifications for example, substitutions, insertions, or deletions.

[0104] By “position” as used herein is meant a location in the sequence of a protein. Positions may be numbered sequentially, or according to an established format, for example the EU index for antibody numbering.

[0105] “Parent polypeptide” as used herein is meant a starting polypeptide that is subsequently modified to generate a variant. The parent polypeptide may be a naturally occurring polypeptide, or a variant or engineered version of a naturally occurring polypeptide. Parent polypeptide may refer to the polypeptide itself, compositions that comprise the parent polypeptide, or the amino acid sequence that encodes it.

[0106] The term “percent identity” as used herein refers to the percent of amino acids that are the same between two or more polypeptides. Sequence identity between two polypeptides can be determined by aligning the amino acid sequences of the polypeptides and scoring the number of positions in the aligned polypeptides that contain the same amino acid residue and comparing that to the number of positions in the aligned polypeptides that differ. Polypeptides can differ at a position, for example, by containing a different amino acid (i.e. substitution or mutation) or by lacking an amino acid (i.e. amino acid insertion or amino acid deletion in one or both of the polypeptides). Sequences with at least 95% sequence identity to a given sequence also include, for example, sequences with 96%, 97%, 98%, and 99% sequence identity. Sequence identity between two similar sequences can be calculated by algorithms such as Smith, T. F. & Waterman, M. S. (1981) “Comparison Of Biosequences,” Adv. Appl. Math. 2:482 [local homology algorithm]; Needleman, S. B. & Wunsch, CD. (1970) “A General Method Applicable To The Search For Similarities In The Amino Acid Sequence Of Two Proteins,” J. Mol. Biol. 48:443 [homology alignment algorithm], Pearson, W. R. & Lipman, D. J. (1988) “Improved Tools For Biological Sequence Comparison,” Proc. Natl. Acad. Sci. (U.S.A.) 85:2444 [search for similarity method]; or Altschul, S. F. et al, (1990) “Basic Local Alignment Search Tool,” J. Mol. Biol. 215:403-10, the “BLAST” algorithm (blast.ncbi.nlm.nih.gov/Blast_cgi).

[0107] “Treat,” “treatment,” and like terms refer to both therapeutic treatment and prophylactic or preventative measures, and includes reducing the severity and/or frequency of symptoms, eliminating symptoms and/or the underlying cause of the symptoms, reducing the frequency or likelihood of symptoms and/or their underlying cause, and improving or remediating damage caused, directly or indirectly, by, for example, an autoimmune disease. Treatment also includes prolonging survival as compared to the expected survival of a subject not receiving treatment. Subjects to be treated include those that have the condition or disorder as well as those prone to have the condition or disorder or those in which the condition or disorder is to be prevented.

[0108] The term “subject” as used herein is intended to mean any animal, in particular, mammals. Any type of mammal can be treated using the disclosed methods. Thus, the methods are applicable to human and nonhuman animals, although preferably used with mice, monkeys, and humans, and most preferably with humans. “Subject” and “patient” are used interchangeably herein.

[0109] As used herein, “administering to said patient” and similar terms indicate a procedure by which a herein disclosed antigen binding molecule is injected into a patient such that target cells, tissues, or segments of the body of the subject are contacted with a herein disclosed antigen binding molecule. Suitable routes of administration include, for example, intravenous administration and subcutaneous administration.

[0110] As used herein, “cancer” and “cancerous” refers to or describe the physiological condition in mammals that is typically characterized by unregulated cell growth, proliferation, or metastasis, and includes both solid cancers and non-solid cancers. Examples of cancer include but are not limited to carcinoma, lymphoma, blastoma, sarcoma (including liposarcoma), neuroendocrine tumors, mesothelioma, schwanoma, meningioma, adenocarcinoma, melanoma, and leukemia or lymphoid malignancies.

[0111] As used herein, the phrase “therapeutically effective amount” refers to an amount of a herein disclosed antigen binding molecule effective to achieve a particular biological or therapeutic result such as, but not limited to, biological or therapeutic results disclosed, described, or exemplified herein. The therapeutically effective amount may vary according to factors such as the disease state, age, sex, and weight of the individual, and the ability of the composition to cause a desired response in a subject.

[0112] “Autoimmune diseases” and like terms as used herein include allogenic islet graft rejection, alopecia areata, ankylosing spondylitis, antiphospholipid syndrome, autoimmune Addison's disease, antineutrophil cytoplasmic autoantibodies (ANCA), autoimmune diseases of the adrenal gland, anti-MDA5 syndrome, antisynthetase syndrome, autoimmune hemolytic anemia, autoimmune hepatitis, autoimmune autonomic ganglionopathy (AAG), autoimmune encephalitis (anti-NMDAR, anti-LGI1), autoimmune myocarditis, autoimmune neutropenia, autoimmune oophoritis and orchitis, autoimmune thrombocytopenia, autoimmune urticaria, Behcet's disease, bullous pemphigoid, cardiomyopathy, Castleman's syndrome, celiac spruce-dermatitis, chronic fatigue immune disfunction syndrome, chronic inflammatory demyelinating polyneuropathy, Churg-Strauss syndrome, cicatrical pemphigoid, cold agglutinin disease, CREST syndrome, cold agglutinin disease, Crohn's disease, dermatomyositis, discoid lupus, Evans syndrome, essential mixed cryoglobulinemia, factor VIII deficiency, fibromyalgia-fibromyositis, glomerulonephritis, Grave's disease, Guillain-Barre, Goodpasture's syndrome, graft-versus-host disease (GVHD), Hashimoto's thyroiditis, hemophilia A, idiopathic pulmonary fibrosis, idiopathic thrombocytopenia purpura (ITP), IgA neuropathy, IgM polyneuropathies, IgA vasculitis (Henoch-Schonlein purpura), IgG4-related disease, immune mediated thrombocytopenia, immune thrombocytopenic purpura (ITP) juvenile arthritis, Kawasaki's disease, lichen planus, lupus erthematosis, Meniere's disease, mixed connective tissue disease, multiple sclerosis, type 1 diabetes mellitus, myasthenia gravis, Neuromyelitis optica spectrum disorder (NMOSD), Overlap myositis, pemphigus vulgaris, pernicious anemia, polyarteritis nodosa, polychrondritis, polyglandular syndromes, polymyalgia rheumatica, polymyositis and dermatomyositis, primary agammaglobinulinemia, primary biliary cirrhosis, primary biliary cholangitis (CD19⁺ plasma-cell dominant), psoriasis, psoriatic arthritis, Reynauld's phenomenon, Reiter's syndrome, rheumatoid arthritis, sarcoidosis, scleroderma, Sjogren's syndrome, solid organ transplant rejection, stiff-man syndrome, systemic lupus erythematosus, systemic sclerosis (diffuse cutaneous subtype), type 1 diabetes mellitus (early or new-onset), takayasu arteritis, temporal arteristis/giant cell arteritis, thrombotic thrombocytopenia purpura, ulcerative colitis, uveitis, vasculitides such as dermatitis herpetiformis vasculitis, vitiligo, and Wegner's granulomatosis.

[0113] “Inflammatory disorders” and like terms as used herein include acute respiratory distress syndrome (ARDS), acute septic arthritis, adjuvant arthritis (Prakken et al., Springer Semin Immunopathol., 2003 August; 25(1):47-63, incorporated entirely by reference), juvenile idiopathic arthritis (de Kleer et al., Arthritis Rheum. 2003 July; 47(7):2001-10, incorporated entirely by reference), allergic encephalomyelitis, allergic rhinitis, allergic vasculitis, allergy, asthma, atherosclerosis, chronic inflammation due to chronic bacterial or viral infections, chronic obstructive pulmonary disease (COPD), coronary artery disease, encephalitis, inflammatory bowel disease, inflammatory osteolysis, inflammation associated with acute and delayed hypersensitivity reactions, inflammation associated with tumors, peripheral nerve injury or demyelinating diseases, inflammation associated with tissue trauma such as burns and ischemia, inflammation due to meningitis, multiple organ injury syndrome, pulmonary fibrosis, sepsis and septic shock, Stevens-Johnson syndrome, undifferentiated arthropy, and undifferentiated spondyloarthropathy.

### Bi-Specific CD3×CD19 Antigen Binding Molecules

[0114] Disclosed herein are bi-specific antigen binding molecules that bind CD3 and CD19. In further variations, antigen binding molecules that specifically bind to CD3 and antigen binding molecules that immunospecifically bind to CD19 are also provided.

[0115] As described herein, the bi-specific CD3×CD19 antigen binding molecules combine the antigen binding domains of an anti-CD3 antigen binding molecule and the antigen binding domains of an anti-CD19 antigen binding molecule. Anti-CD3 and anti-CD19 antigen binding molecules are disclosed separately herein, and can be combined in the bi-specific CD3×CD19 antigen binding molecule as described herein.

### CD3 Antigen Binding Molecules

[0116] Disclosed herein are anti-CD3 antigen binding molecules with improved stability. Sequence changes that mediate improved stability include, but are not limited to, changes in the framework region and changes in the CDRs. Improvements in stability include increase thermostability of the antigen binding molecules. Improving stability of the antigen binding molecule is important if antigen binding molecules are, for example, to be used in high concentrations such as in a subcutaneous formulation.

### CDRs

[0117] Disclosed herein are anti-CD3 antigen binding molecules. In one variation, the anti-CD3 antigen binding molecule comprises an antigen binding domain comprising a first binding subunit comprising the CDR sequences of SEQ ID NO: 9, SEQ ID NO: 10 or 11, and SEQ ID NO: 12, 13, 14, 15, or 16, and a second binding subunit comprising the CDR sequences of SEQ ID NOs: 17, 18, and 19. In some variations, the first binding subunit comprises the CDR sequences of SEQ ID NOs: 9, 10, and 12 and the second binding subunit comprises the CDR sequences of SEQ ID NOs: 17, 18, and 19. In some variations, the first binding subunit comprises the CDR sequences of SEQ ID NOs: 9, 10, and 13 and the second binding subunit comprises the CDR sequences of SEQ ID NOs: 17, 18, and 19. In some variations, the first binding subunit comprises the CDR sequences of SEQ ID NOs: 9, 11, and 12 and the second binding subunit comprises the CDR sequences of SEQ ID NOs: 17, 18, and 19. In some variations, the first binding subunit comprises the CDR sequences of SEQ ID NOs: 9, 11, and 13 and the second binding subunit comprises the CDR sequences of SEQ ID NOs: 17, 18, and 19. In some variations, the first binding subunit comprises the CDR sequences of SEQ ID NOs: 9, 10, and 14 and the second binding subunit comprises the CDR sequences of SEQ ID NOs: 17, 18, and 19. In some variations, the first binding subunit comprises the CDR sequences of SEQ ID NOs: 9, 10, and 15 and the second binding subunit comprises the CDR sequences of SEQ ID NOs: 17, 18, and 19. In some variations, the first binding subunit comprises the CDR sequences of SEQ ID NOs: 9, 11, and 14 and the second binding subunit comprises the CDR sequences of SEQ ID NOs: 17, 18, and 19. In some variations, the first binding subunit comprises the CDR sequences of SEQ ID NOs: 9, 11, and 15 and the second binding subunit comprises the CDR sequences of SEQ ID NOs: 17, 18, and 19. In some variations, the first binding subunit comprises the CDR sequences of SEQ ID NOs: 9, 10, and 16 and the second binding subunit comprises the CDR sequences of SEQ ID NOs: 17, 18, and 19.

### Linkers

[0118] The anti-CD3 antigen binding molecules can comprise a linker between the first binding subunit and the second binding subunit. The linker can comprise at least 95% sequence identity to the amino acid sequence of SEQ ID NO: 36 between the first binding subunit and the second binding subunit. The linker can comprise the amino acid sequence of SEQ ID NO: 36 between the first binding subunit and the second binding subunit. The linker can comprise at least 95% sequence identity to the amino acid sequence of any one of SEQ ID NOs: 49, 50, 51, 52, 53, 54, 55, 56, 57, 58, 59, 60, 61, 62, 63, 64, 65, 66, 67, 68, 69, 70, 71, 72, 73, 74, 75, 76, 77, 78, 79, 80, 81, 82, 83, 84, 85, 86, 87, 88, 89, 90, 91, 92, 93, 94, or 95. At least 95% sequence identity includes, for example, 96%, 97%, 98%, and 99% sequence identity. The linker can comprise the amino acid sequence of any one of SEQ ID NOs: 49, 50, 51, 52, 53, 54, 55, 56, 57, 58, 59, 60, 61, 62, 63, 64, 65, 66, 67, 68, 69, 70, 71, 72, 73, 74, 75, 76, 77, 78, 79, 80, 81, 82, 83, 84, 85, 86, 87, 88, 89, 90, 91, 92, 93, 94, or 95.

### Variable Regions

[0119] In some variations of the anti-CD3 antigen binding molecule, the first binding subunit is a heavy chain variable region (VH) and the second binding subunit is a light chain variable region (VL). In some variations, the VH comprises a VH complementarity determining region (HCDR)1, HCDR2, and HCDR3 comprising the amino acid sequences of SEQ ID NOs: 9, 10, and 12, respectively, and the VL comprises the VL LCDR1, LCDR2, and LCDR3 comprising the amino acid sequences of SEQ ID NOs: 17, 18, and 19, respectively. In some variations, the VH comprises a VH HCDR1, HCDR2, and HCDR3 comprising the amino acid sequences of SEQ ID NOs: 9, 10, and 13, respectively, and the VL comprises the VL LCDR1, LCDR2, and LCDR3 comprising the amino acid sequences of SEQ ID NOs: 17, 18, and 19, respectively. In some variations, the VH comprises a VH HCDR1, HCDR2, and HCDR3 comprising the amino acid sequences of SEQ ID NOs: 9, 11, and 12, respectively, and the VL comprises the VL LCDR1, LCDR2, and LCDR3 comprising the amino acid sequences of SEQ ID NOs: 17, 18, and 19, respectively. In some variations, the VH comprises a VH HCDR1, HCDR2, and HCDR3 comprising the amino acid sequences of SEQ ID NOs: 9, 11, and 13, respectively, and the VL comprises the VL LCDR1, LCDR2, and LCDR3 comprising the amino acid sequences of SEQ ID NOs: 17, 18, and 19, respectively. In some variations, the VH comprises a VH HCDR1, HCDR2, and HCDR3 comprising the amino acid sequences of SEQ ID NOs: 9, 10, and 14, respectively, and the VL comprises the VL LCDR1, LCDR2, and LCDR3 comprising the amino acid sequences of SEQ ID NOs: 17, 18, and 19, respectively. In some variations, the VH comprises a VH HCDR1, HCDR2, and HCDR3 comprising the amino acid sequences of SEQ ID NOs: 9, 10, and 15, respectively, and the VL comprises the VL LCDR1, LCDR2, and LCDR3 comprising the amino acid sequences of SEQ ID NOs: 17, 18, and 19, respectively. In some variations, the VH comprises a VH HCDR1, HCDR2, and HCDR3 comprising the amino acid sequences of SEQ ID NOs: 9, 11, and 14, respectively, and the VL comprises the VL LCDR1, LCDR2, and LCDR3 comprising the amino acid sequences of SEQ ID NOs: 17, 18, and 19, respectively. In some variations, the VH comprises a VH HCDR1, HCDR2, and HCDR3 comprising the amino acid sequences of SEQ ID NOs: 9, 11, and 15, respectively, and the VL comprises the VL LCDR1, LCDR2, and LCDR3 comprising the amino acid sequences of SEQ ID NOs: 17, 18, and 19, respectively. In some variations, the VH comprises a VH HCDR1, HCDR2, and HCDR3 comprising the amino acid sequences of SEQ ID NOs: 9, 10, and 16, respectively, and the VL comprises the VL LCDR1, LCDR2, and LCDR3 comprising the amino acid sequences of SEQ ID NOs: 17, 18, and 19, respectively.

[0120] The anti-CD3 antigen binding molecules can comprise a heavy chain variable region comprising at least 95% sequence identity to the amino acid sequence of SEQ ID NO: 179, 181, 182, 183, 184, 185, 186, 187, 188, or 189, and a VL comprising at least 95% sequence identity to the amino acid sequence of SEQ ID NO: 180. In some variations, the anti-CD3 antigen binding molecule comprises a VH comprising at least 95% sequence identity to the amino acid sequence of SEQ ID NO: 179 and a VL comprising at least 95% sequence identity to the amino acid sequence of SEQ ID NO: 180. In some variations, the anti-CD3 antigen binding molecule comprises a VH comprising at least 95% sequence identity to the amino acid sequence of SEQ ID NO: 181 and a VL comprising at least 95% sequence identity to the amino acid sequence of SEQ ID NO: 180. In some variations, the anti-CD3 antigen binding molecule comprises a VH comprising at least 95% sequence identity to the amino acid sequence of SEQ ID NO: 182 and a VL comprising at least 95% sequence identity to the amino acid sequence of SEQ ID NO: 180. In some variations, the anti-CD3 antigen binding molecule comprises a VH comprising at least 95% sequence identity to the amino acid sequence of SEQ ID NO: 183 and a VL comprising at least 95% sequence identity to the amino acid sequence of SEQ ID NO: 180. In some variations, the anti-CD3 antigen binding molecule comprises a VH comprising at least 95% sequence identity to the amino acid sequence of SEQ ID NO: 184 and a VL comprising at least 95% sequence identity to the amino acid sequence of SEQ ID NO: 180. In some variations, the anti-CD3 antigen binding molecule comprises a VH comprising at least 95% sequence identity to the amino acid sequence of SEQ ID NO: 185 and a VL comprising at least 95% sequence identity to the amino acid sequence of SEQ ID NO: 180. In some variations, the anti-CD3 antigen binding molecule comprises a VH comprising at least 95% sequence identity to the amino acid sequence of SEQ ID NO: 186 and a VL comprising at least 95% sequence identity to the amino acid sequence of SEQ ID NO: 180. In some variations, the anti-CD3 antigen binding molecule comprises a VH comprising at least 95% sequence identity to the amino acid sequence of SEQ ID NO: 187 and a VL comprising at least 95% sequence identity to the amino acid sequence of SEQ ID NO: 180. In some variations, the anti-CD3 antigen binding molecule comprises a VH comprising at least 95% sequence identity to the amino acid sequence of SEQ ID NO: 188 and a VL comprising at least 95% sequence identity to the amino acid sequence of SEQ ID NO: 180. In some variations, the anti-CD3 antigen binding molecule comprises a VH comprising at least 95% sequence identity to the amino acid sequence of SEQ ID NO: 189 and a VL comprising at least 95% sequence identity to the amino acid sequence of SEQ ID NO: 180. At least 95% sequence identity includes, for example, 96%, 97%, 98%, and 99% sequence identity.

[0121] The anti-CD3 antigen binding molecules can comprise a heavy chain variable region comprising the amino acid sequence of SEQ ID NO: 179, 181, 182, 183, 184, 185, 186, 187, 188, or 189, and a VL comprising the amino acid sequence of SEQ ID NO: 180. In some variations, the anti-CD3 antigen binding molecule comprises a VH comprising the amino acid sequence of SEQ ID NO: 179 and a VL comprising the amino acid sequence of SEQ ID NO: 180. In some variations, the anti-CD3 antigen binding molecule comprises a VH comprising the amino acid sequence of SEQ ID NO: 181 and a VL comprising the amino acid sequence of SEQ ID NO: 180. In some variations, the anti-CD3 antigen binding molecule comprises a VH comprising the amino acid sequence of SEQ ID NO: 182 and a VL comprising the amino acid sequence of SEQ ID NO: 180. In some variations, the anti-CD3 antigen binding molecule comprises a VH comprising the amino acid sequence of SEQ ID NO: 183 and a VL comprising the amino acid sequence of SEQ ID NO: 180. In some variations, the anti-CD3 antigen binding molecule comprises a VH comprising the amino acid sequence of SEQ ID NO: 184 and a VL comprising the amino acid sequence of SEQ ID NO: 180. In some variations, the anti-CD3 antigen binding molecule comprises a VH comprising the amino acid sequence of SEQ ID NO: 185 and a VL comprising the amino acid sequence of SEQ ID NO: 180. In some variations, the anti-CD3 antigen binding molecule comprises a VH comprising the amino acid sequence of SEQ ID NO: 186 and a VL comprising the amino acid sequence of SEQ ID NO: 180. In some variations, the anti-CD3 antigen binding molecule comprises a VH comprising the amino acid sequence of SEQ ID NO: 187 and a VL comprising the amino acid sequence of SEQ ID NO: 180. In some variations, the anti-CD3 antigen binding molecule comprises a VH comprising the amino acid sequence of SEQ ID NO: 188 and a VL comprising the amino acid sequence of SEQ ID NO: 180. In some variations, the anti-CD3 antigen binding molecule comprises a VH comprising the amino acid sequence of SEQ ID NO: 189 and a VL comprising the amino acid sequence of SEQ ID NO: 180.

[0122] The anti-CD3 antigen binding molecule can comprise a VH of any one of SEQ ID NOs: 250-2644. The VH of any one of SEQ ID NOs: 250-2644 can comprise a G44C substitution. The VH of any one of SEQ ID NOs: 250-2644 can comprise a N97Q, G96T, G96E, D100G, or any combination thereof, such as G96T/D100G or G96E/D100G. In some embodiments, the substitution is N97Q. In some embodiments, the substitution is D100G. In some embodiments, the substitutions are N97Q and D100G. The anti-CD3 antigen binding molecule can comprise a VL of any one of SEQ ID NOs: 2645-3380. The VL of any one of SEQ ID NOs: 2645-3380 can comprise a G100C substitution. The herein disclosed anti-CD3 antigen binding molecules can comprise any combination of disclosed VH or VL. For example, the anti-CD3 antigen binding molecule can comprise a VH and a VL, wherein the VH comprises any one of SEQ ID NOs: 250-2644 or a variant thereof comprising G44C, N97Q, G96T, G96E, D100G, or a combination thereof, and the VL comprises any one of SEQ ID NOs: 2645-3380 or a variant thereof comprising G100C.

[0123] The herein disclosed anti-CD3 antigen binding molecules can comprise a single-chain variable fragment (scFv) comprising at least 95% sequence identity to the amino acid sequence of SEQ ID NO: 190, 191, 192, 193, 194, 195, 196, 197, 198, 199, 200, 201, 202, 203, 204, 205, 206, 207, 208, or 209. In some variations, the scFV comprises at least 95% sequence identity to the amino acid sequence of SEQ ID NO: 190. In some variations, the scFV comprises at least 95% sequence identity to the amino acid sequence of SEQ ID NO: 191. In some variations, the scFV comprises at least 95% sequence identity to the amino acid sequence of SEQ ID NO: 192. In some variations, the scFV comprises at least 95% sequence identity to the amino acid sequence of SEQ ID NO: 193. In some variations, the scFV comprises at least 95% sequence identity to the amino acid sequence of SEQ ID NO: 194. In some variations, the scFV comprises at least 95% sequence identity to the amino acid sequence of SEQ ID NO: 195. In some variations, the scFV comprises at least 95% sequence identity to the amino acid sequence of SEQ ID NO: 196. In some variations, the scFV comprises at least 95% sequence identity to the amino acid sequence of SEQ ID NO: 197. In some variations, the scFV comprises at least 95% sequence identity to the amino acid sequence of SEQ ID NO: 198. In some variations, the scFV comprises at least 95% sequence identity to the amino acid sequence of SEQ ID NO: 199. In some variations, the scFV comprises at least 95% sequence identity to the amino acid sequence of SEQ ID NO: 200. In some variations, the scFV comprises at least 95% sequence identity to the amino acid sequence of SEQ ID NO: 201. In some variations, the scFV comprises at least 95% sequence identity to the amino acid sequence of SEQ ID NO: 202. In some variations, the scFV comprises at least 95% sequence identity to the amino acid sequence of SEQ ID NO: 203. In some variations, the scFV comprises the amino acid sequence of SEQ ID NO: 204. In some variations, the scFV comprises at least 95% sequence identity to the amino acid sequence of SEQ ID NO: 205. In some variations, the scFV comprises at least 95% sequence identity to the amino acid sequence of SEQ ID NO: 206. In some variations, the scFV comprises at least 95% sequence identity to the amino acid sequence of SEQ ID NO: 207. In some variations, the scFV comprises at least 95% sequence identity to the amino acid sequence of SEQ ID NO: 208. In some variations, the scFV comprises at least 95% sequence identity to the amino acid sequence of SEQ ID NO: 209. At least 95% sequence identity includes, for example, 96%, 97%, 98%, and 99% sequence identity.

[0124] The herein disclosed anti-CD3 antigen binding molecules can comprise a single-chain variable fragment (scFv) comprising the amino acid sequence of SEQ ID NO: 190, 191, 192, 193, 194, 195, 196, 197, 198, 199, 200, 201, 202, 203, 204, 205, 206, 207, 208, or 209. In some variations, the scFV comprises the amino acid sequence of SEQ ID NO: 190. In some variations, the scFV comprises the amino acid sequence of SEQ ID NO: 191. In some variations, the scFV comprises the amino acid sequence of SEQ ID NO: 192. In some variations, the scFV comprises the amino acid sequence of SEQ ID NO: 193. In some variations, the scFV comprises the amino acid sequence of SEQ ID NO: 194. In some variations, the scFV comprises the amino acid sequence of SEQ ID NO: 195. In some variations, the scFV comprises the amino acid sequence of SEQ ID NO: 196. In some variations, the scFV comprises the amino acid sequence of SEQ ID NO: 197. In some variations, the scFV comprises the amino acid sequence of SEQ ID NO: 198. In some variations, the scFV comprises the amino acid sequence of SEQ ID NO: 199. In some variations, the scFV comprises the amino acid sequence of SEQ ID NO: 200. In some variations, the scFV comprises the amino acid sequence of SEQ ID NO: 201. In some variations, the scFV comprises the amino acid sequence of SEQ ID NO: 202. In some variations, the scFV comprises the amino acid sequence of SEQ ID NO: 203. In some variations, the scFV comprises the amino acid sequence of SEQ ID NO: 204. In some variations, the scFV comprises the amino acid sequence of SEQ ID NO: 205. In some variations, the scFV comprises the amino acid sequence of SEQ ID NO: 206. In some variations, the scFV comprises the amino acid sequence of SEQ ID NO: 207. In some variations, the scFV comprises the amino acid sequence of SEQ ID NO: 208. In some variations, the scFV comprises the amino acid sequence of SEQ ID NO: 209.

### Framework Regions

[0125] The anti-CD3 antigen binding molecule can comprise one or more framework regions between CDRs. The framework region described herein can be at specific positions relative to the CDRs of the first binding subunit and the CDRs of the second binding subunit in an antigen binding domain.

[0126] Disclosed herein are anti-CD3 antigen binding molecules comprising an antigen binding domain. The antigen binding domain comprises a first binding subunit, a second binding subunit, and a framework region comprising at least 95% identity to an amino acid sequence selected from the group consisting of SEQ ID NOs: 28, 29, 30, 31, 32, 33, 34, and 35. In some variations, the framework region comprises at least 95% identity to the amino acid sequence of SEQ ID NOs: 28. In some variations, the framework region comprises the amino acid sequence of SEQ ID NOs: 28. In some variations, the framework region comprises at least 95% identity to the amino acid sequence of SEQ ID NOs: 29. In some variations, the framework region comprises the amino acid sequence of SEQ ID NOs: 29. In some variations, the framework region comprises at least 95% identity to the amino acid sequence of SEQ ID NOs: 30. In some variations, the framework region comprises the amino acid sequence of SEQ ID NOs: 30. In some variations, the framework region comprises at least 95% identity to the amino acid sequence of SEQ ID NOs: 31. In some variations, the framework region comprises the amino acid sequence of SEQ ID NOs: 31. In some variations, the framework region comprises at least 95% identity to the amino acid sequence of SEQ ID NOs: 32. In some variations, the framework region comprises the amino acid sequence of SEQ ID NOs: 32. In some variations, the framework region comprises at least 95% identity to the amino acid sequence of SEQ ID NOs: 33. In some variations, the framework region comprises the amino acid sequence of SEQ ID NOs: 33. In some variations, the framework region comprises at least 95% identity to the amino acid sequence of SEQ ID NOs: 34. In some variations, the framework region comprises the amino acid sequence of SEQ ID NOs: 34. In some variations, the framework region comprises at least 95% identity to the amino acid sequence of SEQ ID NOs: 35. In some variations, the framework region comprises the amino acid sequence of SEQ ID NOs: 35. At least 95% sequence identity includes, for example, 96%, 97%, 98%, and 99% sequence identity.

[0127] The anti-CD3 antigen binding molecules can comprise a framework region 1 (FR1) comprising at least 95% identity to the amino acid sequence of SEQ ID NO: 28, a framework region 2 (FR2) comprising at least 95% identity to the amino acid sequence of SEQ ID NO: 29, a framework region 3 (FR3) comprising at least 95% identity to the amino acid sequence of SEQ ID NO: 30, a framework region 4 (FR4) comprising at least 95% identity to the amino acid sequence of SEQ ID NO: 31, a framework region 5 (FR5) comprising at least 95% identity to the amino acid sequence of SEQ ID NO: 32, a framework region 6 (FR6) comprising at least 95% identity to the amino acid sequence of SEQ ID NO: 33, a framework region 7 (FR7) comprising at least 95% identity to the amino acid sequence of SEQ ID NO: 34, and a framework region 8 (FR8) comprising at least 95% identity to the amino acid sequence of SEQ ID NO: 35. At least 95% sequence identity includes, for example, 96%, 97%, 98%, and 99% sequence identity.

[0128] The anti-CD3 antigen binding molecules can comprise FR1 comprising the amino acid sequence of SEQ ID NO: 28, a FR2 comprising the amino acid sequence of SEQ ID NO: 29, a FR3 comprising the amino acid sequence of SEQ ID NO: 30, a FR4 comprising the amino acid sequence of SEQ ID NO: 31, a FR5 comprising the amino acid sequence of SEQ ID NO: 32, a FR6 comprising the amino acid sequence of SEQ ID NO: 33, a FR7 comprising the amino acid sequence of SEQ ID NO: 34, and a FR8 comprising the amino acid sequence of SEQ ID NO: 35.

[0129] Disclosed herein are anti-CD3 antigen binding molecules comprising an amino acid sequence comprising at least 95% identity to SEQ ID NO: 28 N-terminal to a first binding subunit CDR1, an amino acid sequence comprising at least 95% identity to SEQ ID NO: 29 between the first binding subunit CDR1 and a first binding subunit CDR2, an amino acid sequence comprising at least 95% identity to SEQ ID NO: 30 between the first binding subunit CDR2 and a first binding subunit CDR3, an amino acid sequence comprising at least 95% identity to SEQ ID NO: 31 C-terminal to the first binding subunit CDR3, an amino acid sequence comprising at least 95% identity to SEQ ID NO: 32 N-terminal to a second binding subunit CDR1, an amino acid sequence comprising at least 95% identity to SEQ ID NO: 33 between the second binding subunit CDR1 and a second binding subunit CDR2, an amino acid sequence comprising at least 95% identity to SEQ ID NO: 34 between the second binding subunit CDR2 and a second binding subunit CDR3; and an amino acid sequence comprising at least 95% identity to SEQ ID NO: 35 C-terminal to the second binding subunit CDR3. At least 95% sequence identity includes, for example, 96%, 97%, 98%, and 99% sequence identity. In some variations, the first binding subunit CDR1 comprises the amino acid sequence of SEQ ID NO: 9, the first binding subunit CDR2 comprises the amino acid sequence of SEQ ID NO: 10 or 11, the first binding subunit CDR3 comprises the amino acid sequence of SEQ ID NO: 12, 13, 14, 15, or 16, the second binding subunit CDR1 comprising the amino acid sequence of SEQ ID NO: 17, the second binding subunit CDR2 comprises the amino acid sequence of SEQ ID NO: 18, and the second binding subunit CDR3 comprises the amino acid sequence of SEQ ID NO: 19.

[0130] In some variations, the first binding subunit comprises a CDR1, CDR2, and CDR3 comprising the amino acid sequences of SEQ ID NOs: 9, 10, and 12, respectively, and the second binding subunit comprises a CDR1, CDR2, and CDR3 comprising the amino acids sequences of SEQ ID NOs: 17, 18, and 19, respectively. In some variations, the first binding subunit comprises a CDR1, CDR2, and CDR3 comprising the amino acid sequences of SEQ ID NOs: 9, 10, and 13, respectively, and the second binding subunit comprises a CDR1, CDR2, and CDR3 comprising the amino acids sequences of SEQ ID NOs: 17, 18, and 19, respectively. In some variations, the first binding subunit comprises a CDR1, CDR2, and CDR3 comprising the amino acid sequences of SEQ ID NOs: 9, 11, and 12, respectively, and the second binding subunit comprises a CDR1, CDR2, and CDR3 comprising the amino acids sequences of SEQ ID NOs: 17, 18, and 19, respectively. In some variations, the first binding subunit comprises a CDR1, CDR2, and CDR3 comprising the amino acid sequences of SEQ ID NOs: 9, 11, and 13, respectively, and the second binding subunit comprises a CDR1, CDR2, and CDR3 comprising the amino acids sequences of SEQ ID NOs: 17, 18, and 19, respectively. In some variations, the first binding subunit comprises a CDR1, CDR2, and CDR3 comprising the amino acid sequences of SEQ ID NOs: 9, 10, and 14, respectively, and the second binding subunit comprises a CDR1, CDR2, and CDR3 comprising the amino acids sequences of SEQ ID NOs: 17, 18, and 19, respectively. In some variations, the first binding subunit comprises a CDR1, CDR2, and CDR3 comprising the amino acid sequences of SEQ ID NOs: 9, 10, and 15, respectively, and the second binding subunit comprises a CDR1, CDR2, and CDR3 comprising the amino acids sequences of SEQ ID NOs: 17, 18, and 19, respectively. In some variations, the first binding subunit comprises a CDR1, CDR2, and CDR3 comprising the amino acid sequences of SEQ ID NOs: 9, 11, and 14, respectively, and the second binding subunit comprises a CDR1, CDR2, and CDR3 comprising the amino acids sequences of SEQ ID NOs: 17, 18, and 19, respectively. In some variations, the first binding subunit comprises a CDR1, CDR2, and CDR3 comprising the amino acid sequences of SEQ ID NOs: 9, 11, and 15, respectively, and the second binding subunit comprises a CDR1, CDR2, and CDR3 comprising the amino acids sequences of SEQ ID NOs: 17, 18, and 19, respectively. In some variations, the first binding subunit comprises a CDR1, CDR2, and CDR3 comprising the amino acid sequences of SEQ ID NOs: 9, 10, and 16, respectively, and the second binding subunit comprises a CDR1, CDR2, and CDR3 comprising the amino acids sequences of SEQ ID NOs: 17, 18, and 19, respectively.

### Stability

[0131] An antigen binding molecule, such as an anti-CD3 antigen binding molecule can include, for example, a non-canonical deamidation motif GNF at positions 96-98 (Kabat numbering) in the first binding subunit CDR3. Consequentially, variants are made to remove this deamidation liability as well as to engineer stabilizing disulfide bridges. N97 is important for binding, but variants at N97 abrogated binding affinity (with the exception of N97Q which retains some binding). Variants at G96 is also important to binding, and G96E or G96T was found to improve binding affinity (albeit with decrease in stability by ˜2-4° C.).

[0132] The disulfide bridges can increase the thermodynamic stability of the antigen binding molecule. In some variations, the disulfide bridges can increase the denaturation temperature by at least 2° C.). In some variations, the disulfide bridges can increase the denaturation temperature by at least 3° C.). In some variations, the disulfide bridges can increase the denaturation temperature by at least 4° C.).

[0133] D100G, for example, improves affinity. Further variants are engineered to fix the deamidation and incorporate disulfide bridges while maintaining an affinity ladder and improved stability. Sequences for these variants are depicted in, for example, FIG. 17A-FIG. 17J, and affinity (in the context of 2+1 Fab₂-scFv-Fc molecules of FIG. 20A-FIG. 20AD) are depicted in FIG. 30. The re-engineered anti-CD3 antigen binding molecules can have binding affinity similar to a non-engineered anti-CD3 antigen binding molecule, albeit with removal of the deamidation motif and introduction of stabilizing disulfide bridges.

### CD19 Antigen Binding Molecules

[0134] The anti-CD19 antigen binding molecules, for example, are re-humanized and demonstrate enhanced stability.

### CDRs

[0135] Disclosed herein are anti-CD19 antigen binding molecules comprising a first binding subunit comprising the CDR sequences of SEQ ID NOs: 1, 2, and 3, and a second binding subunit comprising the CDR sequences of SEQ ID NOs: 4, 5, and 6.

### Linkers

[0136] The anti-CD19 antigen binding molecules can comprise a linker between the first binding subunit and the second binding subunit. The linker can comprise at least 95% sequence identity to the amino acid sequence of SEQ ID NO: 49, 50, 51, 52, 53, 54, 55, 56, 57, 58, 59, 60, 61, 62, 63, 64, 65, 66, 67, 68, 69, 70, 71, 72, 73, 74, 75, 76, 77, 78, 79, 80, 81, 82, 83, 84, 85, 86, 87, 88, 89, 90, 91, 92, 93, 94, or 95. At least 95% sequence identity includes, for example, 96%, 97%, 98%, and 99% sequence identity. The linker can comprise the amino acid sequence of SEQ ID NO: 49, 50, 51, 52, 53, 54, 55, 56, 57, 58, 59, 60, 61, 62, 63, 64, 65, 66, 67, 68, 69, 70, 71, 72, 73, 74, 75, 76, 77, 78, 79, 80, 81, 82, 83, 84, 85, 86, 87, 88, 89, 90, 91, 92, 93, 94, or 95.

### Variable Regions

[0137] The herein disclosed anti-CD19 antigen binding molecules can comprise a heavy chain variable region (VH) and a light chain variable region (VL). In some variations, the disclosed first binding subunit is a VH, and the disclosed second binding subunit is a VL. In some variations, the VH comprises a heavy chain HCDR1 comprising the amino acid sequence of SEQ ID NO: 1, a HCDR2 comprising the amino acid sequence of SEQ ID NO: 2, and a HCDR3 comprising the amino acid sequence of SEQ ID NO: 3, and the VL comprises a light chain LCDR1 comprising the amino acid sequence of SEQ ID NO: 4, a LCDR2 comprising the amino acid sequence of SEQ ID NO: 5, and a LCDR3 comprising the amino acid sequence of SEQ ID NO: 6.

[0138] The anti-CD19 antigen binding molecules can comprise a heavy chain variable region comprising at least 95% sequence identity to the amino acid sequence of SEQ ID NO: 7, and a light chain variable region comprising at least 95% sequence identity to the amino acid sequence of SEQ ID NO: 8. At least 95% sequence identity includes, for example, 96%, 97%, 98%, and 99% sequence identity.

[0139] The anti-CD19 antigen binding molecules can comprise a heavy chain variable region comprising the amino acid sequence of SEQ ID NO: 7, and a light chain variable region comprising the amino acid sequence of SEQ ID NO: 8.

### Framework Regions

[0140] Disclosed herein are anti-CD19 antigen binding molecules comprising an antigen binding domain. The antigen binding domain comprises a first binding subunit, a second binding subunit, and one or more framework regions. In one variation, a framework region comprising at least 95% identity to an amino acid sequence selected from the group consisting of SEQ ID NOs: 20, 21, 22, 23, 24, 25, 26, and 27. In some variations, the framework region comprises at least 95% identity to the amino acid sequence of SEQ ID NOs: 20. In some variations, the framework region comprises the amino acid sequence of SEQ ID NOs: 20. In some variations, the framework region comprises at least 95% identity to the amino acid sequence of SEQ ID NOs: 21. In some variations, the framework region comprises the amino acid sequence of SEQ ID NOs: 21. In some variations, the framework region comprises at least 95% identity to the amino acid sequence of SEQ ID NOs: 22. In some variations, the framework region comprises the amino acid sequence of SEQ ID NOs: 22. In some variations, the framework region comprises at least 95% identity to the amino acid sequence of SEQ ID NOs: 23. In some variations, the framework region comprises the amino acid sequence of SEQ ID NOs: 23. In some variations, the framework region comprises at least 95% identity to the amino acid sequence of SEQ ID NOs: 24. In some variations, the framework region comprises the amino acid sequence of SEQ ID NOs: 24. In some variations, the framework region comprises at least 95% identity to the amino acid sequence of SEQ ID NOs: 25. In some variations, the framework region comprises the amino acid sequence of SEQ ID NOs: 25. In some variations, the framework region comprises at least 95% identity to the amino acid sequence of SEQ ID NOs: 26. In some variations, the framework region comprises the amino acid sequence of SEQ ID NOs: 26. In some variations, the framework region comprises at least 95% identity to the amino acid sequence of SEQ ID NOs: 27. In some variations, the framework region comprises the amino acid sequence of SEQ ID NOs: 27. At least 95% sequence identity includes, for example, 96%, 97%, 98%, and 99% sequence identity.

[0141] The anti-CD19 antigen binding molecules can comprise a framework region 1 (FR1) comprising at least 95% identity to an amino acid sequence of SEQ ID NO: 20, a framework region 2 (FR2) comprising at least 95% identity to the amino acid sequence of SEQ ID NO: 21, a framework region 3 (FR3) comprising at least 95% identity to the amino acid sequence of SEQ ID NO: 22, a framework region 4 (FR4) comprising at least 95% identity to the amino acid sequence of SEQ ID NO: 23, a framework region 5 (FR5) comprising at least 95% identity to the amino acid sequence of SEQ ID NO: 24, a framework region 6 (FR6) comprising at least 95% identity to the amino acid sequence of SEQ ID NO: 25, a framework region 7 (FR7) comprising at least 95% identity to the amino acid sequence of SEQ ID NO: 26, and a framework region 8 (FR8) comprising at least 95% identity to the amino acid sequence of SEQ ID NO: 27. At least 95% sequence identity includes, for example, 96%, 97%, 98%, and 99% sequence identity.

[0142] The anti-CD19 antigen binding molecules can comprise a framework region 1 (FR1) comprising an amino acid sequence of SEQ ID NO: 20, a framework region 2 (FR2) comprising the amino acid sequence of SEQ ID NO: 21, a framework region 3 (FR3) comprising the amino acid sequence of SEQ ID NO: 22, a framework region 4 (FR4) comprising the amino acid sequence of SEQ ID NO: 23, a framework region 5 (FR5) comprising the amino acid sequence of SEQ ID NO: 24, a framework region 6 (FR6) comprising the amino acid sequence of SEQ ID NO: 25, a framework region 7 (FR7) comprising the amino acid sequence of SEQ ID NO: 26, and a framework region 8 (FR8) comprising the amino acid sequence of SEQ ID NO: 27.

[0143] Disclosed herein are anti-CD19 antigen binding molecules comprising an amino acid sequence comprising at least 95% identity to SEQ ID NO: 20 N-terminal to a first binding subunit CDR1, an amino acid sequence comprising at least 95% identity to SEQ ID NO: 21 between the first binding subunit CDR1 and a first binding subunit CDR2, an amino acid sequence comprising at least 95% identity to SEQ ID NO: 22 between the first binding subunit CDR2 and a first binding subunit CDR3, an amino acid sequence comprising at least 95% identity to SEQ ID NO: 23 C-terminal to the first binding subunit CDR3, an amino acid sequence comprising at least 95% identity to SEQ ID NO: 24 N-terminal to a second binding subunit CDR1, an amino acid sequence comprising at least 95% identity to SEQ ID NO: 25 between the second binding subunit CDR1 and a second binding subunit CDR2, an amino acid sequence comprising at least 95% identity to SEQ ID NO: 26 between the second binding subunit CDR2 and a second binding subunit CDR3, and an amino acid sequence comprising at least 95% identity to SEQ ID NO: 27 C-terminal to the second binding subunit CDR3. At least 95% sequence identity includes, for example, 96%, 97%, 98%, and 99% sequence identity.

[0144] In some variations, the first binding subunit CDR1 comprises the amino acid sequence of SEQ ID NO: 1, the first binding subunit CDR2 comprises the amino acid sequence of SEQ ID NO: 2, the first binding subunit CDR3 comprises the amino acid sequence of SEQ ID NO: 3, the second binding subunit CDR1 comprising the amino acid sequence of SEQ ID NO: 4, the second binding subunit CDR2 comprises the amino acid sequence of SEQ ID NO: 5, and the second binding subunit CDR3 comprises the amino acid sequence of SEQ ID NO: 6.

[0145] The anti-CD19 antigen binding molecules can comprise an amino acid sequence comprising SEQ ID NO: 20 N-terminal to a first binding subunit CDR1, an amino acid sequence comprising SEQ ID NO: 21 between the first binding subunit CDR1 and a first binding subunit CDR2, an amino acid sequence comprising SEQ ID NO: 22 between the first binding subunit CDR2 and a first binding subunit CDR3, an amino acid sequence comprising SEQ ID NO: 23 C-terminal to the first binding subunit CDR3, an amino acid sequence comprising SEQ ID NO: 24 N-terminal to a second binding subunit CDR1, an amino acid sequence comprising SEQ ID NO: 25 between the second binding subunit CDR1 and a second binding subunit CDR2, an amino acid sequence comprising SEQ ID NO: 26 between the second binding subunit CDR2 and a second binding subunit CDR3, and an amino acid sequence comprising SEQ ID NO: 27 C-terminal to the second binding subunit CDR3.

[0146] In some variations, the first binding subunit CDR1 comprises the amino acid sequence of SEQ ID NO: 1, the first binding subunit CDR2 comprises the amino acid sequence of SEQ ID NO: 2, the first binding subunit CDR3 comprises the amino acid sequence of SEQ ID NO: 3, the second binding subunit CDR1 comprising the amino acid sequence of SEQ ID NO: 4, the second binding subunit CDR2 comprises the amino acid sequence of SEQ ID NO: 5, and the second binding subunit CDR3 comprises the amino acid sequence of SEQ ID NO: 6.

### Stability

[0147] Germline identities and 9mers are increased across both the VH and VL, while maintaining binding affinity (FIG. 29). Further, the re-humanized anti-CD19 antigen binding molecule has +7° C. improved Tₘ (FIG. 29). For example, FIG. 29 shows that the anti-CD19 antigen binding molecule has a Tₘ of 78.5° C. compared to a reference anti-CD19 molecule with a Tₘ of 71.5° C.

[0148] An A100Q substitution in the VL FR4 alone improves stability by 1° C. and removed a predicted MHC-binding peptide (data not shown). Improving stability of the antigen binding molecule is important if antigen binding molecules are, for example, to be used in high concentrations such as in a subcutaneous formulation. Additionally, a VL CDR2 methionine that may be liable to oxidation is substituted with alanine (FIG. 28B). The M51A substitution does not damage binding affinity. The re-engineered anti-CD19 antigen binding molecule can contain, for example, 33 amino acid substitutions relative to the parental sequence.

### Bi-Specific Antigen Binding Molecules

[0149] Disclosed herein are anti-CD3 and anti-CD19 bispecific antigen binding molecules comprising an anti-CD19 antigen binding domain with improved stability and an anti-CD3 antigen binding domain with improved stability. Sequence changes that mediate improved stability include, but are not limited to, changes in the framework region. Improvements in stability include increase thermostability of the antigen binding molecules. As described above, improving stability of the antigen binding molecule is important if antigen binding molecules are, for example, to be used in high concentrations such as in a subcutaneous formulation.

### CDRs

[0150] Disclosed herein are bispecific anti-CD3 and anti-CD19 antigen binding molecules. In some embodiments, the bispecific anti-CD3 and anti-CD19 antigen binding molecules comprise any of the herein disclosed anti-CD3 antigen binding molecules and means for binding CD19. In some embodiments, the bispecific anti-CD3 and anti-CD19 antigen binding molecules comprise any of the herein disclosed anti-CD19 antigen binding molecules and means for binding CD3.

[0151] The means for binding CD19 and means for binding CD3 can correspond to Table 2:

TABLE 2
linking the Group I means clause

| Means for | Corresponding Element Disclosure and/or materials |
|---|---|
| Element | and/or acts disclosed in the Specification |
| means for | Species of CD19 antibodies disclosed in WO2023062188, |
| binding | WO2021055528, WO2020221792, WO2019075366, |
| CD19 | WO2012146394, WO2012055961, WO2011051307, |
| | WO2010052013, WO2010052014, WO2009070642, |
| | WO2007068354, WO2005052004, WO2004106380, |
| | WO2004106381, WO1999054440, WO2024227055, |
| | WO2022254337, WO2021108613, WO2020069409, |
| | WO2019210153, WO2019099639, WO2018023025, |
| | WO2016164731, WO2016164580, WO2016109410, |
| | WO2014153270, WO2012079000, WO2024038115, |
| | WO2023240228, WO2024037594, WO2022117799, |
| | WO2022115762, WO2021259902, WO2022115120, |
| | WO2021084063, WO2021084062, WO2021084064, |
| | WO2020225196, WO2020214937, WO2018220040, |
| | WO2018078123, WO2018002031, WO2017214452, |
| | WO2017032679, WO2016189014, WO2015195498, |
| | WO2014184143, WO2013024095, WO2013024097, |
| | WO2008022152, WO2024155810, WO2024025602, |
| | WO2023019200, WO2022236047, WO2022094334, |
| | WO2020219743, WO2013138244, WO2012067981, |
| | WO2010102276, WO2008031056, WO2023274974, |
| | WO2020249528, WO2020109251, WO2020043878, |
| | WO2018229222, WO2018193105, WO2016166298, |
| | WO2015052534, WO2014057117, WO2018183494, |
| | WO2016180941, WO2014058947, WO2013017540, |
| | WO2012156455, WO2024086190, WO2018200496, |
| | WO2025151484, WO2025076058, WO2024226487, |
| | WO2023235852, WO2023215674, WO2022076573, |
| | WO2008022152, WO2018017928, WO2016130902, |
| | WO2015157297, WO2015157286, WO2009052431, |
| | WO2024182516, WO2019213184, WO2017096329, |
| | WO2016033570, WO2021161197, WO2020219848, |
| | WO2019005642, WO2009054863, WO2007002223, |
| | WO2003025018, WO2017096368, WO2016048938, |
| | WO2020135335, WO2020048525, WO2020132810, |
| | WO2020186974, WO2007076950, WO2019215510, |
| | WO2018083535, WO2022125837, WO2019094498, |
| | WO2019125070, WO2019112347, WO2019175071, |
| | WO2020233589, WO2023245106, WO2006125668, |
| | WO2003048209, WO2010095031, WO2010053716, |
| | WO2005012493, WO2006133450, WO2006121852, |
| | WO2017055541, WO2017055328, WO2011147834, |
| | WO2019011918, WO2012010602, WO2012010562, |
| | WO2012010561, WO2012057765, WO2014163684, |
| | WO2014028560, WO2015109131, WO2020053300, |
| | WO2016023909, WO2023218381, WO2021224629, |
| | WO2019220109, WO2016102965, WO2016112855, |
| | WO2016138846, WO2016139487, WO2020014482, |
| | WO2016149578, WO2018126369, WO2017015783, |
| | WO2021255155, WO2017055314, WO2017064221, |
| | WO2017066136, WO2021034227, WO2017095267, |
| | WO2021216731, WO2018108106, WO2018188612, |
| | WO2024188026, WO2018201794, WO2024044743, |
| | WO2019055842, WO2019028051, WO2019057100, |
| | WO2019057122, WO2019057124, WO2022099026, |
| | WO2020069184, WO2019079249, WO2020204152, |
| | WO2019095641, WO2019119822, WO2019137518, |
| | WO2019159193, WO2020108644, WO2020108646, |
| | WO2020108645, WO2020108643, WO2020108642, |
| | WO2019161796, WO2022097061, WO2022097060, |
| | WO2020236792, WO2019195535, WO2022012683, |
| | WO2022012681, WO2019214332, WO2021119551, |
| | WO2019237081, WO2020011706, WO2022216864, |
| | WO2020018922, WO2020055040, WO2020088605, |
| | WO2021213235, WO2020108090, WO2020114358, |
| | WO2020124021, WO2020125653, WO2024012457, |
| | WO2022026330, WO2020180551, WO2020163222, |
| | WO2024006925, WO2020180882, WO2020210232, |
| | WO2021034952, WO2021165248, WO2021173471, |
| | WO2021170146, WO2024197157, WO2023028159, |
| | WO2023028162, WO2021173844, WO2021178253, |
| | WO2021184673, WO2023073645, WO2021217024, |
| | WO2021223720, WO2021262723, WO2022002154, |
| | WO2022007650, WO2022011846, WO2022081486, |
| | WO2023280297, WO2022105811, WO2022120107, |
| | WO2022121880, WO2022159653, WO2022194264, |
| | WO2023090704, WO2023129937, WO2023199235, |
| | WO2023206985, WO2024094741, WO2024079592, |
| | WO2024131874, WO2025067496, WO2025020672, |
| | WO2025137576, WO2025131125, WO2025157132, |
| | incorporated herein by reference to the extent the |
| | species' therein describe binding to CD19. |
| means for | Species of CD3 antibodies disclosed in WO2023062188, |
| binding | WO2021055528, WO2020221792, WO2019075366, |
| CD3 | WO2012146394, WO2012055961, WO2011051307, |
| | WO2010052013, WO2010052014, WO2009070642, |
| | WO2007068354, WO2005052004, WO2004106380, |
| | WO2004106381, WO1999054440, WO2023250367, |
| | WO2023234933, WO2023201291, WO2023091887, |
| | WO2023279092, WO2022241235, WO2023075798, |
| | WO2018093821, WO2015095392, WO2024124107, |
| | WO2024094741, WO2023198727, WO2023180353, |
| | WO2022228706, WO2022148732, WO2022228705, |
| | WO2021214277, WO2018220099, WO2018114748, |
| | WO2017097723, WO2016020309, WO2022199555, |
| | WO2010119119, WO2009030734, WO2007093630, |
| | WO2024236031, WO2024213754, WO2024094822, |
| | WO2023198839, WO2023144306, WO2023144290, |
| | WO2022053654, WO2022053657, WO2022053655, |
| | WO2022053656, WO2022053658, WO2022053653, |
| | WO2021224499, WO2021028587, WO2019155008, |
| | WO2016110576, WO2025094107, WO2025096717, |
| | WO2024231860, WO2024220687, WO2024220682, |
| | WO2024095173, WO2024044548, WO2023086817, |
| | WO2023081705, WO2021228783, WO2019220368, |
| | WO2017031104, WO2025032521, WO2024121777, |
| | WO2022053990, WO2021229507, WO2016166629, |
| | WO2024206739, WO2024182767, WO2023230476, |
| | WO2023044495, WO2023039295, WO2022251258, |
| | WO2022251253, WO2020232247, WO2008079713, |
| | WO2004052397, WO2025094085, WO2024246856, |
| | WO2024220682, WO2024180469, WO2023081704, |
| | WO2022058445, WO2019220368, WO2018017786, |
| | WO2023164143, WO2022072762, WO2021119135, |
| | WO2020047389, WO2017112762, WO2017112775, |
| | WO2017053856, WO2016081490, WO2015143079, |
| | WO2014047231, WO2025014823, WO2021113701, |
| | WO2020191346, WO2020018825, WO2020018820, |
| | WO2023218100, WO2023064942, WO2022221767, |
| | WO2022023566, WO2021255189, WO2021180821, |
| | WO2020089396, WO2019175658, WO2018226833, |
| | WO2018044948, WO2012098238, WO2010132872, |
| | WO2007033230, WO2005118635, WO2005099755, |
| | WO2014141152, WO2011050106, WO2011050104, |
| | WO2007145941, WO2025117764, WO2022006316, |
| | WO2021222578, WO2021222616, WO2020061478, |
| | WO2019133761, WO2019006072, WO2018237037, |
| | WO2018237006, WO2018119215, WO2018052503, |
| | WO2017223111, WO2025080688, WO2023215829, |
| | WO2023278585, WO2017021349, WO2022117045, |
| | WO2020251781, WO2020210277, WO2015026892, |
| | WO2009106096, WO2022189377, WO2022090439, |
| | WO2021255146, WO2020208124, WO2019115659, |
| | WO2019020745, WO2018219901, WO2017118675, |
| | WO2017097723, WO2017055389, WO2023087255, |
| | WO2020018695, WO2019005642, WO2025120113, |
| | WO2025042742, WO2021163329, WO2020219978, |
| | WO2020089437, WO2019226761, WO2018083204, |
| | WO2016036678, WO2013012414, WO2007071422, |
| | WO2007071426, WO2024073700, WO2016141303, |
| | WO2024190892, WO2021020416, WO2021006199, |
| | WO2019156199, WO2021113701, WO2020191346, |
| | WO2020018820, WO2020018825, WO2025106474, |
| | WO2024263845, WO2024233341, WO2024091991, |
| | WO2024020432, WO2024015897, WO2024011179, |
| | WO2023219613, WO2023191816, WO2022076462, |
| | WO2020252366, WO2017106578, WO2003025018, |
| | WO2021243320, WO2021091906, WO2020025532, |
| | WO2017182427, WO2017129585, WO2015036583, |
| | WO2014144722, WO2022103781, WO2021094000, |
| | WO2020025596, WO2017134134, WO2014140248, |
| | WO2013072415, WO2013072406, WO2015026894, |
| | WO2022099006, WO2020243603, WO2020077258, |
| | WO2019075413, WO2016196230, WO2016004108, |
| | WO2017159287, WO2016047722, WO2017030926, |
| | WO2017096368, WO2016048938, WO2018057802, |
| | WO2025128652, WO2025117869, WO2023177772, |
| | WO2023133280, WO2023097030, WO2022212885, |
| | WO2020257604, WO2019246356, WO2018067331, |
| | WO2020135335, WO2020048525, WO2020132810, |
| | WO2020186974, WO2020127354, WO2013083809, |
| | WO2011033105, WO2004106383, WO2013001065, |
| | WO2022119976, WO2016130819, WO2020204708, |
| | WO2020130829, WO2019108065, WO2017010874, |
| | WO2014051433, WO2015063339, WO2014096051, |
| | WO2014079000, WO2025171124, WO2023224912, |
| | WO2020257681, WO2017023761, WO2016001810, |
| | WO2019224717, WO2017157305, WO2023152581, |
| | WO2022162518, WO2020212947, WO2020212949, |
| | WO2019224717, WO2019224718, WO2016179518, |
| | WO2021092217, WO2017021370, WO2017173410, |
| | WO2017021362, WO2020018556, WO2019157340, |
| | WO2017091656, WO2017136659, WO2022212732, |
| | WO2021231434, WO2018098354, WO2018098356, |
| | WO2022256498, WO2018209298, WO2018209304, |
| | WO2021026074, WO2022097090, WO2020261093, |
| | WO2020236795, WO2019229701, WO2018201051, |
| | WO2025027557, WO2024038165, WO2021078774, |
| | WO2020157210, WO2019224711, WO2022256499, |
| | WO2019075378, WO2019075359, WO2023073225, |
| | WO2021089513, WO2019122052, WO2019133961, |
| | WO2021048423, WO2019175198, WO2023060277, |
| | WO2019222428, WO2024052831, WO2019224717, |
| | WO2019224713, WO2022256500, WO2020069028, |
| | WO2019234220, WO2020025792, WO2020210392, |
| | WO2020076853, WO2023094569, WO2022189380, |
| | WO2020127619, WO2021222578, WO2020206330, |
| | WO2021000530, WO2021104371, WO2022024024, |
| | WO2022234146, WO2021185934, WO2024138072, |
| | WO2022042488, WO2023185732, WO2022068810, |
| | WO2022134645, WO2022167460, WO2024251154, |
| | WO2022174813, WO2022218380, WO2022267702, |
| | WO2023242351, WO2025027511, WO2023236889, |
| | WO2024089551, WO2024050797, WO2021200939, |
| | WO2016020444, WO2004024771, WO2004108158, |
| | WO2022060878, WO2017134158, WO2011121110, |
| | WO2010037836, WO2010037837, WO2014108483, |
| | WO2012143524, WO2019160904, WO2012162067, |
| | WO2014163684, WO2014028560, WO2023279095, |
| | WO2015006482, WO2014131712, WO2014131711, |
| | WO2014131694, WO2013026831, WO2013026833, |
| | WO2013026837, WO2013026835, WO2013026839, |
| | WO2013041687, WO2022096698, WO2021247812, |
| | WO2021183861, WO2021150824, WO2014151910, |
| | WO2007042261, WO2015018527, WO2015172800, |
| | WO2015058861, WO2014153002, WO2014153164, |
| | WO2013186613, WO2013188693, WO2017008169, |
| | WO2015006749, WO2014012085, WO2021173889, |
| | WO2020047176, WO2017079272, WO2014129270, |
| | WO2015126548, WO2016016412, WO2016016415, |
| | WO2014114800, WO2021092060, WO2021092056, |
| | WO2018083204, WO2018060301, WO2016087531, |
| | WO2016079177, WO2016020332, WO2014122144, |
| | WO2014128185, WO2025085781, WO2020186176, |
| | WO2019157308, WO2016205531, WO2016055592, |
| | WO2016055593, WO2014167022, WO2016184570, |
| | WO2015172800, WO2014180577, WO2017009442, |
| | WO2015104346, WO2015001085, WO2013149526, |
| | WO2015109131, WO2023280880, WO2013158856, |
| | WO2015146437, WO2015146438, WO2010109924, |
| | WO2015172341, WO2015181098, WO2015184203, |
| | WO2023192606, WO2016014974, WO2019177970, |
| | WO2018140026, WO2016014942, WO2020053300, |
| | WO2016023909, WO2018224441, WO2018224443, |
| | WO2016068803, WO2016068802, WO2020182984, |
| | WO2016071355, WO2025125386, WO2021255143, |
| | WO2016079076, WO2016079050, WO2018102547, |
| | WO2018027147, WO2016089610, WO2018015340, |
| | WO2016116626, WO2025169945, WO2016166360, |
| | WO2016204966, WO2016179003, WO2016180721, |
| | WO2016205200, WO2017001681, WO2022060901, |
| | WO2017021356, WO2017021354, WO2018184966, |
| | WO2017055388, WO2017055395, WO2017055318, |
| | WO2017055385, WO2017055392, WO2017055393, |
| | WO2021255155, WO2017055314, WO2017055391, |
| | WO2017079121, WO2023071953, WO2017070943, |
| | WO2021034227, WO2017095267, WO2021231976, |
| | WO2017100372, WO2017106453, WO2017127499, |
| | WO2017125831, WO2013092001, WO2017143259, |
| | WO2017150762, WO2023064955, WO2019213444, |
| | WO2019075405, WO2023023489, WO2023023491, |
| | WO2021007266, WO2017176760, WO2017201493, |
| | WO2017205726, WO2024168316, WO2021030484, |
| | WO2019028190, WO2019008379, WO2018058001, |
| | WO2025083076, WO2025082594, WO2018054973, |
| | WO2018054484, WO2018068652, WO2020079280, |
| | WO2018197502, WO2018127473, WO2018114754, |
| | WO2019244107, WO2018117237, WO2018162749, |
| | WO2018188612, WO2018199593, WO2018203567, |
| | WO2024086617, WO2023097219, WO2023044402, |
| | WO2020247929, WO2018208864, WO2020247932, |
| | WO2018220584, WO2018222935, WO2018237341, |
| | WO2019023097, WO2023056391, WO2019033050, |
| | WO2023180346, WO2023006809, WO2019034580, |
| | WO2019045856, WO2019057099, WO2019057122, |
| | WO2019057124, WO2019068633, WO2020204305, |
| | WO2019078697, WO2019086534, WO2019095641, |
| | WO2021195513, WO2019104075, WO2024079010, |
| | WO2024079015, WO2019152705, WO2019143636, |
| | WO2019167962, WO2019175806, WO2019184549, |
| | WO2022097061, WO2022097060, WO2020236792, |
| | WO2019195535, WO2019224715, WO2020156405, |
| | WO2019228406, WO2023031397, WO2022167474, |
| | WO2022069712, WO2021110935, WO2019234241, |
| | WO2021119551, WO2019237081, WO2019241216, |
| | WO2020001344, WO2020041537, WO2020061482, |
| | WO2020088403, WO2020088608, WO2020088437, |
| | WO2020088605, WO2018224443, WO2025131071, |
| | WO2020114478, WO2024184287, WO2020127619, |
| | WO2024012457, WO2020168555, WO2020209559, |
| | WO2020232165, WO2020237173, WO2020252907, |
| | WO2020264200, WO2021003189, WO2021009263, |
| | WO2021022304, WO2021023657, WO2021030586, |
| | WO2021027674, WO2023183758, WO2021030680, |
| | WO2021041300, WO2021043810, WO2021044008, |
| | WO2021048724, WO2021053587, WO2021063330, |
| | WO2021064137, WO2021098822, WO2021104430, |
| | WO2021121215, WO2021127088, WO2022098771, |
| | WO2021151020, WO2021155635, WO2021163366, |
| | WO2021163364, WO2021165248, WO2022170305, |
| | WO2021173783, WO2021188590, WO2021209066, |
| | WO2024196678, WO2021216972, WO2022212831, |
| | WO2021236638, WO2021239987, WO2021237717, |
| | WO2022201053, WO2021240388, WO2025021838, |
| | WO2021255142, WO2021260064, WO2023020507, |
| | WO2022002012, WO2022002112, WO2022013775, |
| | WO2022040417, WO2023051727, WO2022037582, |
| | WO2022105924, WO2022042661, WO2025041836, |
| | WO2022045247, WO2023215789, WO2023164513, |
| | WO2022125583, WO2022046658, WO2022063819, |
| | WO2022068809, WO2022069724, WO2023194807, |
| | WO2022125566, WO2022125576, WO2022125562, |
| | WO2022081822, WO2022077108, WO2022087211, |
| | WO2022094147, WO2022096700, WO2023219121, |
| | WO2023199927, WO2022102768, WO2022100613, |
| | WO2022104267, WO2022105787, WO2022116480, |
| | WO2022117050, WO2022129560, WO2022135468, |
| | WO2023036326, WO2022135536, WO2022150803, |
| | WO2022165171, WO2022166940, WO2022171192, |
| | WO2022170740, WO2022170619, WO2025134050, |
| | WO2025134049, WO2022175255, WO2022192895, |
| | WO2022194264, WO2022197907, WO2022200443, |
| | WO2022229434, WO2022234102, WO2025179012, |
| | WO2024100451, WO2024102723, WO2022240637, |
| | WO2022246244, WO2022262868, WO2022262733, |
| | WO2022266660, WO2022263507, WO2023273595, |
| | WO2023273914, WO2025083076, WO2025082594, |
| | WO2023285560, WO2023001154, WO2023000791, |
| | WO2023002392, WO2023002390, WO2023011338, |
| | WO2023015170, WO2023015169, WO2023014809, |
| | WO2023236099, WO2023029089, WO2023049150, |
| | WO2023057571, WO2023060157, WO2023061419, |
| | WO2023061417, WO2023222027, WO2025140489, |
| | WO2023217289, WO2023078450, WO2023078446, |
| | WO2023079425, WO2025051141, WO2023103335, |
| | WO2023104938, WO2023110788, WO2023125729, |
| | WO2024131751, WO2023125611, WO2023131328, |
| | WO2023213998, WO2023138551, WO2023141856, |
| | WO2023164698, WO2023169419, WO2023183766, |
| | WO2023178357, WO2023173258, WO2023174925, |
| | WO2023179716, WO2023178645, WO2023183477, |
| | WO2023186112, WO2023192850, WO2023187130, |
| | WO2023196954, WO2023060169, WO2023199235, |
| | WO2023208014, WO2023206985, WO2023219120, |
| | WO2023221618, WO2023222024, WO2023230626, |
| | WO2024251242, WO2023250272, WO2024002308, |
| | WO2024041435, WO2024144400, WO2024067222, |
| | WO2024074145, WO2024081918, WO2024092038, |
| | WO2025002014, WO2024087521, WO2024102948, |
| | WO2024108032, WO2024118771, WO2024130032, |
| | WO2024129897, WO2024131861, WO2024131874, |
| | WO2024152963, WO2024156672, WO2024160269, |
| | WO2024165403, WO2024229238, WO2024173852, |
| | WO2024178202, WO2024178414, WO2024184812, |
| | WO2024184811, WO2024184810, WO2024191322, |
| | WO2024191168, WO2024188319, WO2024188965, |
| | WO2024188966, WO2024188355, WO2024199294, |
| | WO2024199454, WO2024214007, WO2024213782, |
| | WO2024220397, WO2024235317, WO2024241206, |
| | WO2024254757, WO2025006794, WO2025024646, |
| | WO2025051309, WO2025056013, WO2025064885, |
| | WO2025064890, WO2025103425, WO2025061171, |
| | WO2025064369, WO2025077737, WO2025080533, |
| | WO2025080534, WO2025087681, WO2025092742, |
| | WO2025092742, WO2025091264, WO2025113615, |
| | WO2025122927, WO2025124266, WO2025124523, |
| | WO2025131075, WO2025131077, WO2025132907, |
| | WO2025140010, WO2025157132, WO2025162453, |
| | WO2025175056, incorporated herein by reference to the |
| | extent the species' therein describe binding to CD3. |

TABLE 3
below links Group 2 means clauses to the
relevant portions of the specification

| Means for Element | Corresponding Element Disclosure |
|---|---|
| means for | Species of CD19 antibodies disclosed in paragraph |
| binding CD19 | [0006], [0009]-[0011]. |
| means for | Species of CD3 antibodies disclosed in paragraph |
| binding CD3 | [0006], [00012]-[0014]. |

[0152] The herein disclosed bispecific anti-CD3 and anti-CD19 antigen binding molecules can comprise any of the herein disclosed anti-CD3 antigen binding molecules in combination with any of the herein disclosed anti-CD19 antigen binding molecules. For example, the bi-specific anti-CD19 and anti-CD3 antigen binding molecule can comprise an anti-CD19 antigen binding domain comprising a first binding subunit comprising the CDR sequences of SEQ ID NOs: 1, 2, and 3, and a second binding subunit comprising the CDR sequences of SEQ ID NOs: 4, 5, and 6, and an anti-CD3 antigen binding domain comprising a first binding subunit comprising the CDR sequences of SEQ ID NO: 9, SEQ ID NO: 10 or 11, and SEQ ID NO: 12, 13, 14, 15, or 16, and a second binding subunit comprising the CDR sequences of SEQ ID NOs: 17, 18, and 19. In some variations, the anti-CD19 antigen binding domain comprises a first binding subunit comprising the CDR sequences of SEQ ID NOs: 1, 2, and 3, and a second binding subunit comprising the CDR sequences of SEQ ID NOs: 4, 5, and 6, and the anti-CD3 antigen binding domain comprises a first anti-CD3 binding subunit comprising the CDR sequences of SEQ ID NOs: 9, 10, and 12 and a second anti-CD3 binding subunit comprising the CDR sequences of SEQ ID NOs: 17, 18, and 19. In some variations, the anti-CD19 antigen binding domain comprises a first binding subunit comprising the CDR sequences of SEQ ID NOs: 1, 2, and 3, and a second binding subunit comprising the CDR sequences of SEQ ID NOs: 4, 5, and 6, and the anti-CD3 antigen binding domain comprises a first anti-CD3 binding subunit comprising the CDR sequences of SEQ ID NOs: 9, 10, and 13 and a second anti-CD3 binding subunit comprising the CDR sequences of SEQ ID NOs: 17, 18, and 19. In some variations, the anti-CD19 antigen binding domain comprises a first binding subunit comprising the CDR sequences of SEQ ID NOs: 1, 2, and 3, and a second binding subunit comprising the CDR sequences of SEQ ID NOs: 4, 5, and 6, and the anti-CD3 antigen binding domain comprises a first anti-CD3 binding subunit comprising the CDR sequences of SEQ ID NOs: 9, 11, and 12 and a second anti-CD3 binding subunit comprising the CDR sequences of SEQ ID NOs: 17, 18, and 19. In some variations, the anti-CD19 antigen binding domain comprises a first binding subunit comprising the CDR sequences of SEQ ID NOs: 1, 2, and 3, and a second binding subunit comprising the CDR sequences of SEQ ID NOs: 4, 5, and 6, and the anti-CD3 antigen binding domain comprises a first anti-CD3 binding subunit comprising the CDR sequences of SEQ ID NOs: 9, 11, and 13 and a second anti-CD3 binding subunit comprising the CDR sequences of SEQ ID NOs: 17, 18, and 19. In some variations, the anti-CD19 antigen binding domain comprises a first binding subunit comprising the CDR sequences of SEQ ID NOs: 1, 2, and 3, and a second binding subunit comprising the CDR sequences of SEQ ID NOs: 4, 5, and 6, and the anti-CD3 antigen binding domain comprises a first anti-CD3 binding subunit comprising the CDR sequences of SEQ ID NOs: 9, 10, and 14 and a second anti-CD3 binding subunit comprising the CDR sequences of SEQ ID NOs: 17, 18, and 19. In some variations, the anti-CD19 antigen binding domain comprises a first binding subunit comprising the CDR sequences of SEQ ID NOs: 1, 2, and 3, and a second binding subunit comprising the CDR sequences of SEQ ID NOs: 4, 5, and 6, and the anti-CD3 antigen binding domain comprises a first anti-CD3 binding subunit comprising the CDR sequences of SEQ ID NOs: 9, 10, and 15 and a second anti-CD3 binding subunit comprising the CDR sequences of SEQ ID NOs: 17, 18, and 19. In some variations, the anti-CD19 antigen binding domain comprises a first binding subunit comprising the CDR sequences of SEQ ID NOs: 1, 2, and 3, and a second binding subunit comprising the CDR sequences of SEQ ID NOs: 4, 5, and 6, and the anti-CD3 antigen binding domain comprises a first anti-CD3 binding subunit comprising the CDR sequences of SEQ ID NOs: 9, 11, and 14 and a second anti-CD3 binding subunit comprising the CDR sequences of SEQ ID NOs: 17, 18, and 19. In some variations, the anti-CD19 antigen binding domain comprises a first binding subunit comprising the CDR sequences of SEQ ID NOs: 1, 2, and 3, and a second binding subunit comprising the CDR sequences of SEQ ID NOs: 4, 5, and 6, and the anti-CD3 antigen binding domain comprises a first anti-CD3 binding subunit comprising the CDR sequences of SEQ ID NOs: 9, 11, and 15 and a second anti-CD3 binding subunit comprising the CDR sequences of SEQ ID NOs: 17, 18, and 19. In some variations, the anti-CD19 antigen binding domain comprises a first binding subunit comprising the CDR sequences of SEQ ID NOs: 1, 2, and 3, and a second binding subunit comprising the CDR sequences of SEQ ID NOs: 4, 5, and 6, and the anti-CD3 antigen binding domain comprises a first anti-CD3 binding subunit comprising the CDR sequences of SEQ ID NOs: 9, 10, and 16 and a second anti-CD3 binding subunit comprising the CDR sequences of SEQ ID NOs: 17, 18, and 19.

### Anti-CD19×CD3 Antigen Binding Domain Framework Regions

[0153] In some variations, the herein disclosed bi-specific anti-CD19 and anti-CD3 antigen binding molecules comprise an anti-CD19 antigen binding domain comprising a framework region 1 (FR1) comprising at least 95% identity to an amino acid sequence of SEQ ID NO: 20, a framework region 2 (FR2) comprising at least 95% identity to the amino acid sequence of SEQ ID NO: 21, a framework region 3 (FR3) comprising at least 95% identity to the amino acid sequence of SEQ ID NO: 22, a framework region 4 (FR4) comprising at least 95% identity to the amino acid sequence of SEQ ID NO: 23, a framework region 5 (FR5) comprising at least 95% identity to the amino acid sequence of SEQ ID NO: 24, a framework region 6 (FR6) comprising at least 95% identity to the amino acid sequence of SEQ ID NO: 25, a framework region 7 (FR7) comprising at least 95% identity to the amino acid sequence of SEQ ID NO: 26, and a framework region 8 (FR8) comprising at least 95% identity to the amino acid sequence of SEQ ID NO: 27. At least 95% sequence identity includes, for example, 96%, 97%, 98%, and 99% sequence identity.

[0154] In some variations, the herein disclosed bi-specific anti-CD19 and anti-CD3 antigen binding molecules comprise an anti-CD19 antigen binding domain comprising an amino acid sequence comprising at least 95% identity to SEQ ID NO: 20 N-terminal to a first binding subunit CDR1, an amino acid sequence comprising at least 95% identity to SEQ ID NO: 21 between the first binding subunit CDR1 and a first binding subunit CDR2, an amino acid sequence comprising at least 95% identity to SEQ ID NO: 22 between the first binding subunit CDR2 and a first binding subunit CDR3, an amino acid sequence comprising at least 95% identity to SEQ ID NO: 23 C-terminal to the first binding subunit CDR3, an amino acid sequence comprising at least 95% identity to SEQ ID NO: 24 N-terminal to a second binding subunit CDR1, an amino acid sequence comprising at least 95% identity to SEQ ID NO: 25 between the second binding subunit CDR1 and a second binding subunit CDR2, an amino acid sequence comprising at least 95% identity to SEQ ID NO: 26 between the second binding subunit CDR2 and a second binding subunit CDR3, and an amino acid sequence comprising at least 95% identity to SEQ ID NO: 27 C-terminal to the second binding subunit CDR3. At least 95% sequence identity includes, for example, 96%, 97%, 98%, and 99% sequence identity.

[0155] In some variations, the herein disclosed bi-specific anti-CD19 and anti-CD3 antigen binding molecules comprise an anti-CD19 antigen binding domain comprising a framework region 1 (FR1) comprising an amino acid sequence of SEQ ID NO: 20, a framework region 2 (FR2) comprising the amino acid sequence of SEQ ID NO: 21, a framework region 3 (FR3) comprising the amino acid sequence of SEQ ID NO: 22, a framework region 4 (FR4) comprising the amino acid sequence of SEQ ID NO: 23, a framework region 5 (FR5) comprising the amino acid sequence of SEQ ID NO: 24, a framework region 6 (FR6) comprising the amino acid sequence of SEQ ID NO: 25, a framework region 7 (FR7) comprising the amino acid sequence of SEQ ID NO: 26, and a framework region 8 (FR8) comprising the amino acid sequence of SEQ ID NO: 27.

[0156] In some variations, the herein disclosed bi-specific anti-CD19 and anti-CD3 antigen binding molecules comprise an anti-CD19 antigen binding domain comprising an amino acid sequence comprising SEQ ID NO: 20 N-terminal to a first binding subunit CDR1, an amino acid sequence comprising SEQ ID NO: 21 between the first binding subunit CDR1 and a first binding subunit CDR2, an amino acid sequence comprising SEQ ID NO: 22 between the first binding subunit CDR2 and a first binding subunit CDR3, an amino acid sequence comprising SEQ ID NO: 23 C-terminal to the first binding subunit CDR3, an amino acid sequence comprising SEQ ID NO: 24 N-terminal to a second binding subunit CDR1, an amino acid sequence comprising SEQ ID NO: 25 between the second binding subunit CDR1 and a second binding subunit CDR2, an amino acid sequence comprising SEQ ID NO: 26 between the second binding subunit CDR2 and a second binding subunit CDR3, and an amino acid sequence comprising SEQ ID NO: 27 C-terminal to the second binding subunit CDR3.

### Anti-CD19 Antigen Binding Domain Variable Regions

[0157] In some variations, the herein disclosed bi-specific anti-CD19 and anti-CD3 antigen binding molecules comprise a first anti-CD19 binding subunit and a first anti-CD3 binding subunit that are heavy chain variable regions, and a second anti-CD19 binding subunit and a second anti-CD3 binding subunit that are light chain variable regions. In some variations, the bi-specific anti-CD19 and anti-CD3 antigen binding molecules comprise an anti-CD19 antigen binding domain comprising a heavy chain variable region comprising at least 95% sequence identity to the amino acid sequence of SEQ ID NO: 7, and a light chain variable region comprising at least 95% sequence identity to the amino acid sequence of SEQ ID NO: 8. At least 95% sequence identity includes, for example, 96%, 97%, 98%, and 99% sequence identity. In some variations, the bi-specific anti-CD19 and anti-CD3 antigen binding molecules comprise an anti-CD19 antigen binding domain comprising a heavy chain variable region comprising the amino acid sequence of SEQ ID NO: 7, and a light chain variable region comprising the amino acid sequence of SEQ ID NO: 8.

Anti-CD3 Antigen binding domain Framework Regions

[0158] In some variations, the herein disclosed bi-specific anti-CD19 and anti-CD3 antigen binding molecules comprise an anti-CD3 antigen binding domain comprising a framework region 1 (FR1) comprising at least 95% identity to the amino acid sequence of SEQ ID NO: 28, a framework region 2 (FR2) comprising at least 95% identity to the amino acid sequence of SEQ ID NO: 29, a framework region 3 (FR3) comprising at least 95% identity to the amino acid sequence of SEQ ID NO: 30, a framework region 4 (FR4) comprising at least 95% identity to the amino acid sequence of SEQ ID NO: 31, a framework region 5 (FR5) comprising at least 95% identity to the amino acid sequence of SEQ ID NO: 32, a framework region 6 (FR6) comprising at least 95% identity to the amino acid sequence of SEQ ID NO: 33, a framework region 7 (FR7) comprising at least 95% identity to the amino acid sequence of SEQ ID NO: 34, and a framework region 8 (FR8) comprising at least 95% identity to the amino acid sequence of SEQ ID NO: 35. At least 95% sequence identity includes, for example, 96%, 97%, 98%, and 99% sequence identity.

[0159] In some variations, the herein disclosed bi-specific anti-CD19 and anti-CD3 antigen binding molecules comprise an anti-CD3 antigen binding domain comprising an amino acid sequence comprising at least 95% identity to SEQ ID NO: 28 N-terminal to a first binding subunit CDR1, an amino acid sequence comprising at least 95% identity to SEQ ID NO: 29 between the first binding subunit CDR1 and a first binding subunit CDR2, an amino acid sequence comprising at least 95% identity to SEQ ID NO: 30 between the first binding subunit CDR2 and a first binding subunit CDR3, an amino acid sequence comprising at least 95% identity to SEQ ID NO: 31 C-terminal to the first binding subunit CDR3, an amino acid sequence comprising at least 95% identity to SEQ ID NO: 32 N-terminal to a second binding subunit CDR1, an amino acid sequence comprising at least 95% identity to SEQ ID NO: 33 between the second binding subunit CDR1 and a second binding subunit CDR2, an amino acid sequence comprising at least 95% identity to SEQ ID NO: 34 between the second binding subunit CDR2 and a second binding subunit CDR3, and an amino acid sequence comprising at least 95% identity to SEQ ID NO: 35 C-terminal to the second binding subunit CDR3. At least 95% sequence identity includes, for example, 96%, 97%, 98%, and 99% sequence identity.

[0160] In some variations, the herein disclosed bi-specific anti-CD19 and anti-CD3 antigen binding molecules comprise an anti-CD3 antigen binding domain comprising a framework region 1 (FR1) comprising the amino acid sequence of SEQ ID NO: 28, a framework region 2 (FR2) comprising the amino acid sequence of SEQ ID NO: 29, a framework region 3 (FR3) comprising the amino acid sequence of SEQ ID NO: 30, a framework region 4 (FR4) comprising the amino acid sequence of SEQ ID NO: 31, a framework region 5 (FR5) comprising the amino acid sequence of SEQ ID NO: 32, a framework region 6 (FR6) comprising the amino acid sequence of SEQ ID NO: 33, a framework region 7 (FR7) comprising the amino acid sequence of SEQ ID NO: 34, and a framework region 8 (FR8) comprising the amino acid sequence of SEQ ID NO: 35.

[0161] In some variations, the herein disclosed bi-specific anti-CD19 and anti-CD3 antigen binding molecules comprise an anti-CD3 antigen binding domain comprising an amino acid sequence comprising SEQ ID NO: 28 N-terminal to a first binding subunit CDR1, an amino acid sequence comprising SEQ ID NO: 29 between the first binding subunit CDR1 and a first binding subunit CDR2, an amino acid sequence comprising SEQ ID NO: 30 between the first domain CDR2 and a first binding subunit CDR3, an amino acid sequence comprising SEQ ID NO: 31 C-terminal to the first binding subunit CDR3, an amino acid sequence comprising SEQ ID NO: 32 N-terminal to a second binding subunit CDR1, an amino acid sequence comprising SEQ ID NO: 33 between the second binding subunit CDR1 and a second domain CDR2, an amino acid sequence comprising SEQ ID NO: 34 between the second binding subunit CDR2 and a second binding subunit CDR3, and an amino acid sequence comprising SEQ ID NO: 35 C-terminal to the second binding subunit CDR3.

Anti-CD3 Antigen binding domain Variable Regions

[0162] In some variations, the herein disclosed bi-specific anti-CD19 and anti-CD3 antigen binding molecules comprise a first anti-CD19 binding subunit and a first anti-CD3 binding subunit that are heavy chain variable regions, and a second anti-CD19 binding subunit and a second anti-CD3 binding subunit that are light chain variable regions. In some variations, the bi-specific anti-CD19 and anti-CD3 antigen binding molecules comprise an anti-CD3 antigen binding domain comprising a light chain variable region comprising at least 95% sequence identity to the amino acid sequence of SEQ ID NO: 180, and a heavy chain variable region comprising at least 95% sequence identity to the amino acid sequence of SEQ ID NO: 179, 181, 182, 183, 184, 185, 186, 187, 188, or 189. At least 95% sequence identity includes, for example, 96%, 97%, 98%, and 99% sequence identity. In some variations, the bi-specific anti-CD19 and anti-CD3 antigen binding molecules comprise an anti-CD3 antigen binding domain comprising a light chain variable region comprising the amino acid sequence of SEQ ID NO: 180, and a heavy chain variable region comprising the amino acid sequence of SEQ ID NO: 179, 181, 182, 183, 184, 185, 186, 187, 188, or 189.

### Anti-CD3 Antigen Binding Domain Single-Chain Variable Fragments

[0163] In some variations, the herein disclosed bi-specific anti-CD19 and anti-CD3 antigen binding molecules comprise an anti-CD3 antigen binding domain comprising a single-chain variable fragment comprising at least 95% sequence identity to the amino acid sequence of SEQ ID NO: 190, 191, 192, 193, 194, 195, 196, 197, 198, 199, 200, 201, 202, 203, 204, 205, 206, 207, 208, or 209. At least 95% sequence identity includes, for example, 96%, 97%, 98%, and 99% sequence identity. In some variations, the bi-specific anti-CD19 and anti-CD3 antigen binding molecules comprise an anti-CD3 antigen binding domain comprising a single-chain variable fragment comprising the amino acid sequence of SEQ ID NO: 190, 191, 192, 193, 194, 195, 196, 197, 198, 199, 200, 201, 202, 203, 204, 205, 206, 207, 208, or 209.

### Bispecific Formats

[0164] The herein disclosed bi-specific anti-CD19 and anti-CD3 antigen binding molecules can be a 1+1 Fab-scFv-Fc, 2+1 Fab₂-scFv-Fc, 1+1 Common Light Chain, 2+1 Common Light Chain, 2+1 mAb-scFv, 2+1 stackFab₂-scFv-Fc, Dual scFv, One-arm scFv-mAb, caveman, Bispecific mAb, One-arm central-scFv, mAb-Fv, central-Fv, or Trident. In some variations, the herein disclosed bi-specific anti-CD19 and anti-CD3 antigen binding molecules are a 1+1 Fab-scFv-Fc. In some variations, the herein disclosed bi-specific anti-CD19 and anti-CD3 antigen binding molecules are a 2+1 Fab₂-scFv-Fc. In some variations, the herein disclosed bi-specific anti-CD19 and anti-CD3 antigen binding molecules are a 1+1 Common Light Chain. In some variations, the herein disclosed bi-specific anti-CD19 and anti-CD3 antigen binding molecules are a 2+1 Common Light Chain. In some variations, the herein disclosed bi-specific anti-CD19 and anti-CD3 antigen binding molecules are a 2+1 mAb-scFv. In some variations, the herein disclosed bi-specific anti-CD19 and anti-CD3 antigen binding molecules are a 2+1 stackFab₂-scFv-Fc. In some variations, the herein disclosed bi-specific anti-CD19 and anti-CD3 antigen binding molecules are a Dual scFv. In some variations, the herein disclosed bi-specific anti-CD19 and anti-CD3 antigen binding molecules are a One-arm scFv-mAb. In some variations, the herein disclosed bi-specific anti-CD19 and anti-CD3 antigen binding molecules are a scFv-mAb. In some variations, the herein disclosed bi-specific anti-CD19 and anti-CD3 antigen binding molecules are a Bispecific mAb. In some variations, the herein disclosed bi-specific anti-CD19 and anti-CD3 antigen binding molecules are a One-arm central-scFv. In some variations, the herein disclosed bi-specific anti-CD19 and anti-CD3 antigen binding molecules are a mAb-Fv. In some variations, the herein disclosed bi-specific anti-CD19 and anti-CD3 antigen binding molecules are a central-Fv. In some variations, the herein disclosed bi-specific anti-CD19 and anti-CD3 antigen binding molecules are a Trident.

[0165] The 1+1 Fab-scFv-Fc bi-specific anti-CD19 and anti-CD3 antigen binding molecules can comprise the amino acid sequences of SEQ ID NOs: 210, 211, and 212, SEQ ID NOs: 213, 214, and 215, SEQ ID NOs: 213, 216, and 215, SEQ ID NOs: 213, 217, and 215, or SEQ ID NOs: 213, 218, and 215. In some variations, the 1+1 Fab-scFv-Fc bi-specific anti-CD19 and anti-CD3 antigen binding molecule comprises the amino acid sequences of SEQ ID NOs: 210, 211, and 212. In some variations, the 1+1 Fab-scFv-Fc bi-specific anti-CD19 and anti-CD3 antigen binding molecule comprises the amino acid sequences of SEQ ID NOs: 213, 214, and 215. In some variations, the 1+1 Fab-scFv-Fc bi-specific anti-CD19 and anti-CD3 antigen binding molecule comprises the amino acid sequences of SEQ ID NOs: 213, 216, and 215. In some variations, the 1+1 Fab-scFv-Fc bi-specific anti-CD19 and anti-CD3 antigen binding molecule comprises the amino acid sequences of 213, 217, and 215. In some variations, the 1+1 Fab-scFv-Fc bi-specific anti-CD19 and anti-CD3 antigen binding molecule comprises the amino acid sequences of SEQ ID NOs: 213, 218, and 215.

[0166] The 2+1 Fab₂-scFv-Fc bi-specific anti-CD19 and anti-CD3 antigen binding molecules can comprise the amino acid sequences of SEQ ID NOs: 210, 219, and 212, SEQ ID NOs: 210, 220, and 212, SEQ ID NOs: 210, 221, and 212, SEQ ID NOs: 210, 222, and 212, SEQ ID NOs: 210, 223, and 212, SEQ ID NOs: 210, 224, and 212, SEQ ID NOs: 210, 225, and 212, SEQ ID NOs: 210, 226, and 212, SEQ ID NOs: 210, 227, and 212, SEQ ID NOs: 210, 228, and 212, SEQ ID NOs: 210, 229, and 212, SEQ ID NOs: 210, 230, and 212, SEQ ID NOs: 210, 231, and 212, SEQ ID NOs: 232, 233, and 215, SEQ ID NOs: 232, 234, and 215, SEQ ID NOs: 232, 235, and 215, SEQ ID NOs: 232, 236, and 215, SEQ ID NOs: 232, 237, and 215, SEQ ID NOs: 232, 238, and 215, SEQ ID NOs: 232, 239, and 215, SEQ ID NOs: 232, 240, and 215, SEQ ID NOs: 232, 241, and 215, SEQ ID NOs: 232, 242, and 215, SEQ ID NOs: 232, 243, and 215, SEQ ID NOs: 232, 244, and 215, SEQ ID NOs: 232, 245, and 215, SEQ ID NOs: 213, 246, and 215, SEQ ID NOs: 213, 247, and 215, SEQ ID NOs: 213, 248, and 215, or SEQ ID NOs: 213, 249, and 215. In some variations, the 2+1 Fab₂-scFv-Fc bi-specific anti-CD19 and anti-CD3 antigen binding molecule comprises the amino acid sequences of SEQ ID NOs: 210, 219, and 212. In some variations, the 2+1 Fab₂-scFv-Fc bi-specific anti-CD19 and anti-CD3 antigen binding molecule comprises the amino acid sequences of SEQ ID NOs: 210, 220, and 212. In some variations, the 2+1 Fab₂-scFv-Fc bi-specific anti-CD19 and anti-CD3 antigen binding molecule comprises the amino acid sequences of SEQ ID NOs: 210, 221, and 212. In some variations, the 2+1 Fab₂-scFv-Fc bi-specific anti-CD19 and anti-CD3 antigen binding molecule comprises the amino acid sequences of SEQ ID NOs: 210, 222, and 212. In some variations, the 2+1 Fab₂-scFv-Fc bi-specific anti-CD19 and anti-CD3 antigen binding molecule comprises the amino acid sequences of SEQ ID NOs: 210, 223, and 212. In some variations, the 2+1 Fab₂-scFv-Fc bi-specific anti-CD19 and anti-CD3 antigen binding molecule comprises the amino acid sequences of SEQ ID NOs: 210, 224, and 212. In some variations, the 2+1 Fab₂-scFv-Fc bi-specific anti-CD19 and anti-CD3 antigen binding molecule comprises the amino acid sequences of SEQ ID NOs: 210, 225, and 212. In some variations, the 2+1 Fab₂-scFv-Fc bi-specific anti-CD19 and anti-CD3 antigen binding molecule comprises the amino acid sequences of SEQ ID NOs: 210, 226, and 212. In some variations, the 2+1 Fab₂-scFv-Fc bi-specific anti-CD19 and anti-CD3 antigen binding molecule comprises the amino acid sequences of SEQ ID NOs: 210, 227, and 212. In some variations, the 2+1 Fab₂-scFv-Fc bi-specific anti-CD19 and anti-CD3 antigen binding molecule comprises the amino acid sequences of SEQ ID NOs: 210, 228, and 212. In some variations, the 2+1 Fab₂-scFv-Fc bi-specific anti-CD19 and anti-CD3 antigen binding molecule comprises the amino acid sequences of SEQ ID NOs: 210, 229, and 212. In some variations, the 2+1 Fab₂-scFv-Fc bi-specific anti-CD19 and anti-CD3 antigen binding molecule comprises the amino acid sequences of SEQ ID NOs: 210, 230, and 212. In some variations, the 2+1 Fab₂-scFv-Fc bi-specific anti-CD19 and anti-CD3 antigen binding molecule comprises the amino acid sequences of SEQ ID NOs: 210, 231, and 212. In some variations, the 2+1 Fab₂-scFv-Fc bi-specific anti-CD19 and anti-CD3 antigen binding molecule comprises the amino acid sequences of SEQ ID NOs: 232, 233, and 215. In some variations, the 2+1 Fab₂-scFv-Fc bi-specific anti-CD19 and anti-CD3 antigen binding molecule comprises the amino acid sequences of SEQ ID NOs: 232, 234, and 215. In some variations, the 2+1 Fab₂-scFv-Fc bi-specific anti-CD19 and anti-CD3 antigen binding molecule comprises the amino acid sequences of SEQ ID NOs: 232, 235, and 215. In some variations, the 2+1 Fab₂-scFv-Fc bi-specific anti-CD19 and anti-CD3 antigen binding molecule comprises the amino acid sequences of SEQ ID NOs: 232, 236, and 215. In some variations, the 2+1 Fab₂-scFv-Fc bi-specific anti-CD19 and anti-CD3 antigen binding molecule comprises the amino acid sequences of SEQ ID NOs: 232, 237, and 215. In some variations, the 2+1 Fab₂-scFv-Fc bi-specific anti-CD19 and anti-CD3 antigen binding molecule comprises the amino acid sequences of SEQ ID NOs: 232, 238, and 215. In some variations, the 2+1 Fab₂-scFv-Fc bi-specific anti-CD19 and anti-CD3 antigen binding molecule comprises the amino acid sequences of SEQ ID NOs: 232, 239, and 215. In some variations, the 2+1 Fab₂-scFv-Fc bi-specific anti-CD19 and anti-CD3 antigen binding molecule comprises the amino acid sequences of SEQ ID NOs: 232, 240, and 215. In some variations, the 2+1 Fab₂-scFv-Fc bi-specific anti-CD19 and anti-CD3 antigen binding molecule comprises the amino acid sequences of SEQ ID NOs: 232, 241, and 215. In some variations, the 2+1 Fab₂-scFv-Fc bi-specific anti-CD19 and anti-CD3 antigen binding molecule comprises the amino acid sequences of SEQ ID NOs: 232, 242, and 215. In some variations, the 2+1 Fab₂-scFv-Fc bi-specific anti-CD19 and anti-CD3 antigen binding molecule comprises the amino acid sequences of SEQ ID NOs: 232, 243, and 215. In some variations, the 2+1 Fab₂-scFv-Fc bi-specific anti-CD19 and anti-CD3 antigen binding molecule comprises the amino acid sequences of SEQ ID NOs: 232, 244, and 215. In some variations, the 2+1 Fab₂-scFv-Fc bi-specific anti-CD19 and anti-CD3 antigen binding molecule comprises the amino acid sequences of SEQ ID NOs: 232, 245, and 215. In some variations, the 2+1 Fab₂-scFv-Fc bi-specific anti-CD19 and anti-CD3 antigen binding molecule comprises the amino acid sequences of SEQ ID NOs: 213, 246, and 215. In some variations, the 2+1 Fab₂-scFv-Fc bi-specific anti-CD19 and anti-CD3 antigen binding molecule comprises the amino acid sequences of SEQ ID NOs: 213, 247, and 215. In some variations, the 2+1 Fab₂-scFv-Fc bi-specific anti-CD19 and anti-CD3 antigen binding molecule comprises the amino acid sequences of SEQ ID NOs: 213, 248, and 215. In some variations, the 2+1 Fab₂-scFv-Fc bi-specific anti-CD19 and anti-CD3 antigen binding molecule comprises the amino acid sequences of SEQ ID NOs: 213, 249, and 215.

### Stability

[0167] The anti-CD3 antigen binding domain of the bispecific antigen binding molecule can include, for example, a non-canonical deamidation motif GNF at positions 96-98 (Kabat numbering) in the first binding subunit CDR3. Consequentially, variants are made to remove this deamidation liability as well as to engineer stabilizing disulfide bridges. N97 is important for binding, but variants at N97 abrogated binding affinity (with the exception of N97Q which retains some binding). Variants at G96 is also important to binding, and G96E or G96T was found to improve binding affinity (albeit with decrease in stability by ˜2-4° C.).

[0168] The disulfide bridges can increase the thermodynamic stability of the anti-CD3 antigen binding domain of the bispecific antigen binding molecule. In some variations, the disulfide bridges can increase the denaturation temperature by at least 2° C.). In some variations, the disulfide bridges can increase the denaturation temperature by at least 3° C.). In some variations, the disulfide bridges can increase the denaturation temperature by at least 4° C.).

[0169] The anti-CD3 antigen binding domain of the bispecific antigen binding molecule can include, for example a D100G substitution to improve affinity. Further variants are engineered to fix the deamidation and incorporate disulfide bridges while maintaining an affinity ladder and improved stability of the anti-CD3 antigen binding domain. Sequences for these variants are depicted in, for example, FIG. 17A-FIG. 17J, and affinity (in the context of 2+1 Fab₂-scFv-Fc molecules of FIG. 20A-FIG. 20AD) are depicted in FIG. 30. The re-engineered anti-CD3 antigen binding domain can have binding affinity similar to a non-engineered anti-CD3 antigen binding molecule, albeit with removal of the deamidation motif and introduction of stabilizing disulfide bridges.

[0170] The anti-CD19 antigen binding domain of the bispecific antigen binding molecules are, for example, re-humanized and demonstrate enhanced stability. Germline identities and 9mers were increased across both the VH and VL, while maintaining binding affinity (FIG. 29). Further, the re-humanized anti-CD19 antigen binding domain has +7° C. improved Tₘ (FIG. 29). For example, FIG. 29 shows that the anti-CD19 antigen binding domain has a Tₘ of 78.5° C. compared to a reference anti-CD19 molecule with a Tₘ of 71.5° C.

[0171] An A100Q substitution in the VL FR4 alone of the anti-CD19 antigen binding domain of the bispecific antigen binding molecules improves stability by 1° C. and removed a predicted MHC-binding peptide (data not shown). Additionally, a VL CDR2 methionine that may be liable to oxidation is substituted with alanine (FIG. 28B). The M51A substitution does not damage binding affinity. The re-engineered anti-CD19 antigen binding domain can contain, for example, 33 amino acid substitutions relative to the parental sequence.

[0172] The herein disclosed anti-CD3 and anti-CD19 bispecific antigen binding molecules exhibit comparable CD19+ Ramos cell killing and T-cell activation compared to the reference bispecific molecules that lack the sequence changes that mediate the improved stability.

### Nucleic Acids, Vectors, and Host Cells

[0173] In one embodiment of the present invention, nucleic acids are created that encode the antigen binding molecules, and particularly antibodies described herein, and that may then be cloned into vectors host cells. A nucleic acid composition may refer to one or multiple polynucleotides.

[0174] Thus, nucleic acids, and particularly DNA, may be made that encode each protein sequence. These practices are carried out using well-known procedures. For example, a variety of methods that may find use in the present invention are described in Molecular Cloning—A Laboratory Manual, 3rd Ed. (Maniatis, Cold Spring Harbor Laboratory Press, New York, 2012), incorporated herein by reference in its entirety.

[0175] The antibodies of the present invention may be produced by culturing a host cell transformed with nucleic acid, preferably an expression vector, containing nucleic acid encoding the antibodies, under the appropriate conditions to induce or cause expression of the protein. The conditions appropriate for expression will vary with the choice of the expression vector and the host cell, and will be easily ascertained by one skilled in the art through routine experimentation. A wide variety of appropriate host cells may be used, including but not limited to mammalian cells, bacteria, insect cells, and yeast. For example, a variety of cell lines that may find use in the present invention are described in the ATCC® cell line catalog, available from the American Type Culture Collection.

[0176] The nucleic acids that encode the antibodies may be incorporated into an expression vector in order to express components of the antibody. A variety of expression vectors may be utilized for protein expression. Expression vectors may comprise self-replicating extra-chromosomal vectors or vectors which integrate into a host genome. Expression vectors are constructed to be compatible with the host cell type. Thus expression vectors which find use in the present invention include but are not limited to those which enable protein expression in mammalian cells, bacteria, insect cells, yeast, and in in vitro systems. As is known in the art, a variety of expression vectors are available, commercially or otherwise, that may find use in the present invention for expressing antibodies.

[0177] As is known in the art, the nucleic acids encoding the components of the binding domains and antibodies disclosed herein can be incorporated into expression vectors as is known in the art, and depending on the host cells used to produce antibodies, including heterodimeric antibodies. Expression vectors typically comprise a protein operably linked with control or regulatory sequences, selectable markers, any fusion partners, and/or additional elements. Nucleic acids are operably linked to any number of regulatory elements (promoters, origin of replication, selectable markers, ribosomal binding sites, inducers, etc.). The expression vectors can be extra-chromosomal or integrating vectors. Generally, vectors include transcriptional and translational regulatory nucleic acid operably linked to the nucleic acid encoding the antibody, and are typically appropriate to the host cell used to express the protein.

[0178] As will be appreciated by those in the art, the nucleic acid compositions will depend on the format and scaffold of the heterodimeric protein. Thus, for example, when the format requires three amino acid sequences, such as for the 1+1 Fab-scFv-Fc or 2+1 Fab₂-scFv-Fc formats, three polynucleotides can be incorporated into one or more expression vectors for expression. In some embodiments, each polynucleotide is incorporated into a different expression vector. In other embodiments, polynucleotides can be incorporated into the same expression vector.

[0179] The polynucleotides and/or expression vectors of the invention are then transformed into any number of different types of host cells as is well known in the art, including mammalian, bacterial, yeast, insect and/or fungal cells, with mammalian cells (e.g., CHO cells), finding use in many embodiments.

[0180] In some embodiments, polynucleotides encoding each monomer are each contained within a single expression vector, generally under different or the same promoter controls. In embodiments of particular use in the present invention, each of these polynucleotides are contained on different expression vectors.

[0181] The antibodies provided herein are made by culturing host cells comprising the expression vector(s) as is well known in the art. Once produced, traditional antibody purification steps are done, including an ion exchange chromatography step. As discussed herein, having the pls of the two monomers differ by at least 0.5 can allow separation by ion exchange chromatography or isoelectric focusing, or other methods sensitive to isoelectric point. That is, the inclusion of pl substitutions that alter the isoelectric point (pl) of each monomer so that such that each monomer has a different pl and the heterodimer also has a distinct pl, thus facilitating isoelectric purification of the “1+1 Fab-scFv-Fc” heterodimer (e.g., anionic exchange columns, cationic exchange columns). These substitutions also aid in the determination and monitoring of any contaminating dual scFv-Fc and mAb homodimers post-purification (e.g., IEF gels, clEF, and analytical IEX columns).

[0182] Proteins may be isolated or purified in a variety of ways known to those skilled in the art. Standard purification methods include chromatographic techniques, including ion exchange, hydrophobic interaction, affinity, sizing or gel filtration, and reversed-phase, carried out at atmospheric pressure or at high pressure using systems such as FPLC and HPLC. Purification methods also include electrophoretic, immunological, precipitation, dialysis, and chromatofocusing techniques. Ultrafiltration and diafiltration techniques, in conjunction with protein concentration, are also useful. As is well known in the art, a variety of natural proteins bind Fc and antibodies, and these proteins can find use in the present invention for purification of antibodies. For example, the bacterial proteins A and G bind to the Fc region. Likewise, the bacterial protein L binds to the Fab region of some antibodies, as of course does the antibody's target antigen. Purification can often be enabled by a particular fusion partner. For example, antibodies may be purified using glutathione resin if a GST fusion is employed, Ni+2 affinity chromatography if a His-tag is employed, or immobilized anti-flag antibody if a flag-tag is used. For general guidance in suitable purification techniques, see, e.g. incorporated entirely by reference Protein Purification: Principles and Practice, 3rd Ed., Scopes, Springer-Verlag, NY, 1994, incorporated entirely by reference. The degree of purification necessary will vary depending on the screen or use of the antibodies. In some instances no purification is necessary. If the antibodies are secreted, screening may take place directly from the media. As is well known in the art, some methods of selection do not involve purification of proteins. Thus, for example, if a library of antibodies is made into a phage display library, protein purification may not be performed.

### Uses of the Bispecific Antigen Binding Molecules

[0183] Disclosed herein are methods of depleting B-cells in a subject, the method comprising administering any of the herein disclosed bi-specific anti-CD19 and anti-CD3 antigen binding molecules to the subject. Disclosed herein are compositions comprising any of the herein disclosed bispecific antibodies for use in a method of depleting B-cells in a subject, the method comprising administering the composition to the subject. Disclosed herein are any of the herein disclosed bispecific antibodies for use in the preparation of a medicament useful for depleting B-cells in a subject.

[0184] The methods for depleting B-cells can be useful in treating B cell-mediated disorders, including but not limited to allergic responses, autoimmune diseases, inflammatory diseases, and hematological malignancies.

[0185] The herein disclosed methods and uses can deplete peripheral B-cells, bone marrow B-cells, and lymph node B-cells. In some embodiments, peripheral B-cells are depleted.

[0186] In some embodiments, bone marrow B-cells are depleted. In some embodiments, lymph node B-cells are depleted.

[0187] The bi-specific binding molecules can be administered to the subject by any suitable means of administration including, for example, subcutaneous administration or intravenous administration. In some embodiments, the bi-specific binding molecules are administered subcutaneously. In some embodiments, the bi-specific binding molecules are administered intravenously.

[0188] Disclosed herein are methods of treating an autoimmune, inflammatory disorder, or cancer in a subject, the method comprising administering any of the herein disclosed the bi-specific anti-CD19 and anti-CD3 antigen binding molecules to the subject. In some embodiments, an autoimmune disorder is treated. In some embodiments, an inflammatory disease is treated. In some variations, cancer is treated. Specifically, the treatment methods disclosed herein comprise administration to a patient in need of such administration a therapeutic amount of the antigen binding molecule as described herein.

[0189] Disclosed herein are compositions comprising any of the herein disclosed bispecific antibodies for use in a method of treating an autoimmune disorder, inflammatory disease, or cancer in a subject, the method comprising administering the composition to the subject. Disclosed herein are any of the herein disclosed bi-specific antibodies for use in the preparation of a medicament useful for treating an autoimmune disorder in a subject. In some embodiments, an autoimmune disorder is treated. In some embodiments, an inflammatory disease is treated. In some embodiments, cancer is treated.

[0190] In some variations, the antibodies disclosed herein can be for use in the treatment of an autoimmune disorder (or any specific autoimmune disorder described herein). In some variations, the antibodies disclosed herein can be for use in the treatment of an inflammatory disease (or any specific inflammatory disease described herein). In some variations, the antibodies disclosed herein can be for use in the treatment of cancer (or any specific cancer described herein).

[0191] In one variation, the autoimmune disease is allogenic islet graft rejection. In another variation, the autoimmune disease is alopecia areata. In another variation, the autoimmune disease is ankylosing spondylitis. In another variation, the autoimmune disease is antiphospholipid syndrome. In another variation, the autoimmune disease is autoimmune Addison's disease. In another variation, the autoimmune disease is antineutrophil cytoplasmic autoantibodies (ANCA). In another variation, the autoimmune disease is autoimmune diseases of the adrenal gland. In some variations, the autoimmune disease is anti-MDA5 syndrome. In another variation, the autoimmune disease is antisynthetase syndrome. In another variation, the autoimmune disease is autoimmune autonomic ganglionopathy (AAG). In another variation, the autoimmune disease is autoimmune encephalitis (anti-NMDAR, anti-LGI1). In another variation, the autoimmune disease is autoimmune hemolytic anemia. In another variation, the autoimmune disease is autoimmune hepatitis. In another variation, the autoimmune disease is autoimmune myocarditis. In another variation, the autoimmune disease is autoimmune neutropenia. In another variation, the autoimmune disease is autoimmune oophoritis and orchitis. In another variation, the autoimmune disease is autoimmune thrombocytopenia. In another variation, the autoimmune disease is autoimmune urticaria. In another variation, the autoimmune disease is Behcet's disease. In another variation, the autoimmune disease is bullous pemphigoid. In another variation, the autoimmune disease is cardiomyopathy. In another variation, the autoimmune disease is Castleman's syndrome. In another variation, the autoimmune disease is celiac spruce-dermatitis. In another variation, the autoimmune disease is chronic fatigue immune disfunction syndrome. In another variation, the autoimmune disease is chronic inflammatory demyelinating polyneuropathy. In another variation, the autoimmune disease is Churg-Strauss syndrome. In another variation, the autoimmune disease is cicatrical pemphigoid. In another variation, the autoimmune disease is cold agglutinin disease. In another variation, the autoimmune disease is CREST syndrome. In another variation, the autoimmune disease is cold agglutinin disease. In another variation, the autoimmune disease is Crohn's disease. In another variation, the autoimmune disease is dermatomyositis. In another variation, the autoimmune disease is discoid lupus. In another variation, the autoimmune disease is essential mixed cryoglobulinemia. In another variation, the autoimmune disease is Evans syndrome. In another variation, the autoimmune disease is factor VIII deficiency. In another variation, the autoimmune disease is fibromyalgia-fibromyositis. In another variation, the autoimmune disease is glomerulonephritis. In another variation, the autoimmune disease is Grave's disease. In another variation, the autoimmune disease is Guillain-Barre. In another variation, the autoimmune disease is Goodpasture's syndrome. In another variation, the autoimmune disease is graft-versus-host disease (GVHD). In another variation, the autoimmune disease is Hashimoto's thyroiditis. In another variation, the autoimmune disease is hemophilia A. In another variation, the autoimmune disease is idiopathic pulmonary fibrosis. In another variation, the autoimmune disease is immune mediated thrombocytopenia. In another variation, the autoimmune disease is immune thrombocytopenic purpura (ITP). In another variation, the autoimmune disease is IgA neuropathy. In another variation, the autoimmune disease is IgM polyneuropathies. In another variation, the autoimmune disease is IgA vasculitis (Henoch-Schonlein purpura). In another variation, the autoimmune disease is IgG4-related disease. In another variation, the autoimmune disease is immune mediated thrombocytopenia. In another variation, the autoimmune disease is juvenile arthritis. In another variation, the autoimmune disease is Kawasaki's disease. In another variation, the autoimmune disease is lichen planus. In another variation, the autoimmune disease is lupus erthematosis. In another variation, the autoimmune disease is Meniere's disease. In another variation, the autoimmune disease is mixed connective tissue disease. In another variation, the autoimmune disease is multiple sclerosis. In another variation, the autoimmune disease is type 1 diabetes mellitus. In another variation, the autoimmune disease is myasthenia gravis. In another variation, the autoimmune disease is Neuromyelitis optica spectrum disorder (NMOSD). In another variation, the autoimmune disease is Overlap myositis. In another variation, the autoimmune disease is pemphigus vulgaris. In another variation, the autoimmune disease is pernicious anemia. In another variation, the autoimmune disease is polyarteritis nodosa. In another variation, the autoimmune disease is polychrondritis. In another variation, the autoimmune disease is polyglandular syndromes. In another variation, the autoimmune disease is polymyalgia rheumatica. In another variation, the autoimmune disease is polymyositis and dermatomyositis. In another variation, the autoimmune disease is primary agammaglobinulinemia. In another variation, the autoimmune disease is primary biliary cirrhosis. In another variation, the autoimmune disease is primary biliary cholangitis (CD19⁺ plasma-cell dominant). In another variation, the autoimmune disease is psoriasis. In another variation, the autoimmune disease is psoriatic arthritis. In another variation, the autoimmune disease is Reynauld's phenomenon. In another variation, the autoimmune disease is Reiter's syndrome. In another variation, the autoimmune disease is rheumatoid arthritis. In another variation, the autoimmune disease is sarcoidosis. In another variation, the autoimmune disease is scleroderma. In another variation, the autoimmune disease is Sjogren's syndrome. In another variation, the autoimmune disease is solid organ transplant rejection. In another variation, the autoimmune disease is stiff-man syndrome. In another variation, the autoimmune disease is systemic lupus erythematosus (SLE). in another variation, the autoimmune disease is type 1 diabetes mellitus (early or new-onset). In another variation, the autoimmune disease is systemic sclerosis (diffuse cutaneous subtype). In another variation, the autoimmune disease is takayasu arteritis. In another variation, the autoimmune disease is temporal arteristis/giant cell arteritis. In another variation, the autoimmune disease is thrombotic thrombocytopenia purpura. In another variation, the autoimmune disease is ulcerative colitis. In another variation, the autoimmune disease is uveitis. In another variation, the autoimmune disease is vasculitides such as dermatitis herpetiformis vasculitis. In another variation, the autoimmune disease is vitiligo. In another variation, the autoimmune disease is Wegner's granulomatosis.

[0192] In one variation, the inflammatory disorder is acute respiratory distress syndrome (ARDS). In another variation, the inflammatory disorder is acute septic arthritis. In another variation, the inflammatory disorder is adjuvant arthritis (Prakken et al., Springer Semin Immunopathol., 2003 August; 25(1):47-63, incorporated entirely by reference), juvenile idiopathic arthritis (de Kleer et al., Arthritis Rheum. 2003 July; 47(7):2001-10, incorporated entirely by reference). In another variation, the inflammatory disorder is allergic encephalomyelitis. In another variation, the inflammatory disorder is allergic rhinitis. In another variation, the inflammatory disorder is allergic vasculitis. In another variation, the inflammatory disorder is allergy. In another variation, the inflammatory disorder is asthma. In another variation, the inflammatory disorder is atherosclerosis. In another variation, the inflammatory disorder is chronic inflammation due to chronic bacterial or viral infectionis. In another variation, the inflammatory disorder is chronic obstructive pulmonary disease (COPD). In another variation, the inflammatory disorder is coronary artery disease. In another variation, the inflammatory disorder is encephalitis. In another variation, the inflammatory disorder is inflammatory bowel disease. In another variation, the inflammatory disorder is inflammatory osteolysis. In another variation, the inflammatory disorder is inflammation associated with acute and delayed hypersensitivity reactions. In another variation, the inflammatory disorder is inflammation associated with tumors. In another variation, the inflammatory disorder is peripheral nerve injury or demyelinating diseases. In another variation, the inflammatory disorder is inflammation associated with tissue trauma such as burns and ischemia. In another variation, the inflammatory disorder is inflammation due to meningitis. In another variation, the inflammatory disorder is multiple organ injury syndrome. In another variation, the inflammatory disorder is pulmonary fibrosis. In another variation, the inflammatory disorder is sepsis and septic shock. In another variation, the inflammatory disorder is Stevens-Johnson syndrome. In another variation, the inflammatory disorder is undifferentiated arthropy. In another variation, the inflammatory disorder is undifferentiated spondyloarthropathy.

[0193] In some variations, a cancer is treated. The cancer can be a non-small cell lung cancer, small cell lung cancer, renal cell cancer, colorectal cancer, ovarian cancer, breast cancer, pancreatic cancer, gastric carcinoma, bladder cancer, esophageal cancer, mesothelioma, melanoma, head and neck cancer, thyroid cancer, sarcoma, prostate cancer, glioblastoma, cervical cancer, thymic carcinoma, leukemia, lymphomas, myelomas, mycoses fungoids, merkel cell cancer, and other hematologic malignancies, such as classical Hodgkin lymphoma (CHL), primary mediastinal large B-cell lymphoma, T-cell/histiocyte-rich B-cell lymphoma, EBV-positive and -negative PTLD, and EBV-associated diffuse large B-cell lymphoma (DLBCL), plasmablastic lymphoma, extranodal NK/T-cell lymphoma, nasopharyngeal carcinoma, and HHV8-associated primary effusion lymphoma, Hodgkin's lymphoma, neoplasm of the central nervous system (CNS), such as primary CNS lymphoma, spinal axis tumor, or brain stem glioma.

[0194] Cancers can include hematologic malignancies, such as non-Hodgkin's lymphomas (NHL), including refractory/resistant NHL. NHL cancers include but are not limited to Burkitt's lymphoma (BL), small lymphocytic lymphoma (SLL), chronic lymphocytic leukemia (CLL), mantle cell lymphoma (MCL), follicular lymphoma (FL), marginal zone B-cell lymphoma (MZL), hairy cell leukemia (HCL) and lymphoplasmacytic leukemia (LPL), mucosa-associated lymphoid tissue (MALT), extranodal marginal zone B-cell lymphoma of MALT, nodal marginal zone B cell lymphoma, mediastinal large cell lymphoma, intravascular large cell lymphoma, primary effusion lymphoma, precursor B-lymphoblastic leukemia/lymphoma, precursor T- and NK-cells lymphoma (precursor T lymphoblastic lymphoma, blastic NK cell lymphoma), tumors of the mature T and NK cells, including peripheral T-cell lymphoma and leukemia (PTL), adult T-cell leukemia/T-cell lymphomas and large granular lymphocytic leukemia, T-cell chronic lymphocytic leukemia/prolymphocytic leukemia, T-cell large granular lymphocytic leukemia, aggressive NK-cell leukemia, extranodal T-/NK cell lymphoma, enteropathy-type T-cell lymphoma, hepatosplenic T-cell lymphoma, anaplastic large cell lymphoma (ALCL), angiocetric and angioimmunoblastic T-cell lymphoma, mycosis fungoides/Sezary syndrome, and cutaneous T-cell lymphoma (CTCL).

[0195] In some variations, the cancer is a CD19-related cancer, such as B cell lymphoma, optionally Hodgkin lymphoma or non-Hodgkin lymphoma. Non-Hodgkin lymphoma can include large B-cell lymphoma (DLBCL), FL, MLL, MZL, MALT, small lymphocytic lymphoma (such as CLL), MCL, Acute Lymphoblastic Leukemia (ALL), or Waldenstrom's Macroglobulinemia (WM). In some variations, the CD19-related cancer is CD19⁺ macrophage-rich hepatocellular carcinoma (experimental TAM-targeting). In some variations, the CD19-related cancer is CD19⁺ multiple myeloma (subsets with retained B-cell lineage antigens). In some variations, the CD19-related cancer is CD19⁺ testicular lymphoma (relapsed cases). In some variations, the CD19-related cancer is CD19-expressing transformed marginal zone lymphoma.

[0196] In some variations, the cancer is a non-small cell lung cancer. In some variations, the cancer is a small cell lung cancer. In some variations, the cancer is a renal cell cancer. In some variations, the cancer is a colorectal cancer. In some variations, the cancer is a ovarian cancer. In some variations, the cancer is a breast cancer. In some variations, the cancer is a pancreatic cancer. In some variations, the cancer is a gastric carcinoma. In some variations, the cancer is a bladder cancer. In some variations, the cancer is a esophageal cancer. In some variations, the cancer is a mesothelioma. In some variations, the cancer is a melanoma. In some variations, the cancer is a head a nd neck cancer. In some variations, the cancer is a thyroid cancer. In some variations, the cancer is a sarcoma. In some variations, the cancer is a prostate cancer. In some variations, the cancer is a glioblastoma. In some variations, the cancer is a cervical cancer. In some variations, the cancer is a thymic carcinoma. In some variations, the cancer is a leukemia. In some variations, the cancer is a lymphomas. In some variations, the cancer is a myeloma. In some variations, the cancer is a mycoses fungoids. In some variations, the cancer is a myeloma. In some variations, the cancer is a myeloid neoplasias. In some variations, the cancer is a merkel cell cancer. In some variations, the cancer is a primary mediastinal large B-cell lymphoma. In some variations, the cancer is a T-cell/histiocyte-rich B-cell lymphoma. In some variations, the cancer is gray zone lymphoma. In some variations, the cancer is diffuse large B-cell lymphoma (DLCL). In some variations, the cancer is diffuse large B-cell lymphoma (DLBCL). In some variations, the cancer is an EBV-positive PTLD. In some variations, the cancer is an EBV-negative PDLL. In some variations, the cancer is an EBV-associated DLBCL. In some variations, the cancer is a plasmablastic lymphoma. In some variations, the cancer is an extranodal NK/T-cell lymphoma. In some variations, the cancer is a nasopharyngeal carcinoma. In some variations, the cancer is an HHV8-associated primary effusion lymphoma. In some variations, the cancer is a Hodgkin's lymphoma. In some variations, the cancer is a Hodgkin's lymphoma including AML with maturation. In some variations, the cancer is a neoplasm of the central nervous system (CNS). In some variations, the cancer is a spinal axis tumor. In some variations, the cancer is a brain stem glioma. In some variations, the cancer is a post-transplant lymphoproliferative disorder (PTLD). In some variations, the cancer is thymoma. In some variations, the cancer is transformed follicular lymphoma. In some variations, the cancer is a tumor of lymphocyte precursor cells.

[0197] In some variations, the cancer is a non-Hodgkin's lymphomas (NHL). In some variations, the NHL is a refractory/resistant NHL. In some variations, the NHL is Burkitt's lymphoma (BL). In some variations, the NHL issmall lymphocytic lymphoma (SLL). In some variations, the NHL ischronic lymphocytic leukemia (CLL). In some variations, the NHL is a mantle cell lymphoma (MCL). In some variations, the NHL isfollicular lymphoma (FL). In some variations, the NHL is marginal zone B-cell lymphoma (MZL). In some variations, the NHL is hairy cell leukemia (HCL) and lymphoplasmacytic leukemia (LPL). In some variations, the NHL is mucosa-associated lymphoid tissue (MALT). In some variations, the NHL is extranodal marginal zone B-cell lymphoma of MALT. In some variations, the NHL is nodal marginal zone B cell lymphoma. In some variations, the NHL is mediastinal large cell lymphoma. In some variations, the NHL is intravascular large cell lymphoma. In some variations, the NHL is primary effusion lymphoma. In some variations, the NHL is precursor B-lymphoblastic leukemia/lymphoma. In some variations, the NHL is precursor T- and NK-cells lymphoma (such as precursor T lymphoblastic lymphoma. In some variations, the NHL is blastic NK cell lymphoma). In some variations, the NHL is peripheral T-cell lymphoma and leukemia (PTL). In some variations, the NHL is large granular lymphocytic leukemia. In some variations, the NHL is T-cell chronic lymphocytic leukemia/prolymphocytic leukemia. In some variations, the NHL is T-cell large granular lymphocytic leukemia. In some variations, the NHL is aggressive NK-cell leukemia. In some variations, the NHL is extranodal T-/NK cell lymphoma. In some variations, the NHL is enteropathy-type T-cell lymphoma. In some variations, the NHL is hepatosplenic T-cell lymphoma. In some variations, the NHL is an aplastic large cell lymphoma (ALCL). In some variations, the NHL is an anangiocetric and angioimmunoblastic T-cell lymphoma. In some variations, the NHL is a mycosis fungoides/Sezary syndrome. In some variations, the NHL is a cutaneous T-cell lymphoma (CTCL).

[0198] The bi-specific binding molecules can be administered to the subject by any suitable means of administration including, for example, subcutaneous administration or intravenous administration. In some embodiments, the bi-specific binding molecules are administered subcutaneously. In some embodiments, the bi-specific binding molecules are administered intravenously.

### EXAMPLES

[0199] The following examples are provided to further describe some of the variations disclosed herein. The examples are intended to illustrate, not to limit, the disclosed variations.

### Example 1: CD19 Binding Domains

[0200] Sequences for human, mouse, and cynomolgus CD19 are depicted in FIG. 2 and are useful for the development of cross-reactive CD19 antigen binding domains for ease of clinical development. Sequences for CD19 binding domains which may find use in the CD19×CD3 bsAbs of the disclosure are known in the art, illustrative sequences which are depicted in FIG. 14. CD19 binding domains were also engineered (as will be described in Example 6) for use in the CD19×CD3 bsAbs of the disclosure, sequences for which are depicted in FIG. 15.

### Example 2: CD3 Binding Domains

[0201] Sequences for human, mouse, and cynomolgus CD3 are depicted in FIG. 1 and are useful for the development of cross-reactive CD3 antigen binding domains for ease of clinical development. Sequences for CD3 binding domains which may find use in the CD19×CD3 bsAbs of the disclosure are known in the art, illustrative sequences which are depicted in FIG. 16A-FIG. 16F. Novel CD3 binding domains were also engineered (as will be described in Example 7) for use in the CD19×CD3 bsAbs of the disclosure, sequences for which are depicted in FIG. 17A-FIG. 17J.

### Example 3: Engineering CD19×CD3 bsAbs

### 3A: 1+1 Fab-scFv-Fc Format

[0202] One example format utilizing Fab domains and scFv is the 1+1 Fab-scFv-Fc format (depicted schematically in FIG. 18A) which comprises a first monomer comprising a single-chain Fv (“scFv”) with a first antigen binding specificity covalently attached to a first heterodimeric Fc domain i.e., scFv-domain linker-CH2-CH3, a second monomer comprising a heavy chain i.e., VH-CH1-hinge-CH2-CH3, wherein the CH2-CH3 is a second heterodimeric Fc domain complementary to the first heterodimeric Fc domain, and a light chain (LC) transfected separately so that a Fab domain having a second antigen binding specificity is formed with the heavy chain variable region.

### 3B: 2+1 Fab₂-scFv-Fc Format

[0203] Another format utilizing two Fab domains and scFv is the 2+1 Fab2-scFv-Fc format (depicted schematically in FIG. 18B) which comprises a first monomer comprising a VH-CH1 domain covalently attached to an scFv (having a first antigen binding specificity) covalently attached to a first heterodimeric Fc domain i.e., VH-CH1-first domain linked-scFv-second domain linker-CH2-CH3, a second monomer comprising a heavy chain i.e., VH-CH1-hinge-CH2-CH3, wherein the CH2-CH3 is a second heterodimeric Fc domain complementary to the first heterodimeric Fc domain, and a light chain (LC) transfected separately so that a Fab domain having a second antigen binding specificity is formed with the heavy chain variable region.

[0204] Any number of heterodimerization approaches as is known in the art could find use in this (and other) bispecific formats, in combination with any number of approaches for purifying heterodimers from contaminating homodimers, including those depicted in FIG. A-FIG. 3F. Any of the number of linkers as is known in the art may find use in linking the VH and VL domains of the scFv. Finally, it may be useful to maximize serum half-life of the bsAbs, and any of the number of half-life extending variants as is known in the art may find use in these bsAbs.3

[0205] In particular, the bsAbs may utilize Backbones 1 or 11 in FIG. 9. The backbones utilize the L368D/K370S (on the HC) S364K/E357Q (on the VH-scFv-Fc or scFv-Fc) heterodimeric Fc variants. The HC side further includes pI variants N208D/Q295E/N384D/Q418E/N421D to increase negative charge of the heavy chain. The scFv utilizes a positively charged (GKPGS)₄ linker between the VH and VL domains to increase positive charge of the scFv-Fc chain. Collectively, these two approaches enable easy purification of heterodimers from contaminating homodimers. The FcγR ablation variants utilized in this platform are the E233P/L234V/L235A/G236_/S267K substitutions on both the HC and the VH-scFv-Fc or scFv-Fc monomers. In some cases, bsAbs includes the M428L/N434S half-life extension variants. Sequences for illustrative CD19×CD3 bsAbs in the 1+1 Fab-scFv-Fc and in the 2+1 Fab₂-scFv-Fc formats are depicted respectively in FIG. 19A-FIG. 19C and FIG. 20A-FIG. 20AD.

[0206] Although the above provide particularly useful backbones, any number of heterodimerization approaches as is known in the art could find use in the bispecific formats, in combination with any number of approaches for purifying heterodimers from contaminating homodimers, including those depicted in FIG. 3A-FIG. 3F and FIG. 4. Any of the number of linkers as is known in the art may find use in linking the VH and VL domains of the scFv. Finally, it may be useful to maximize serum half-life of the bsAbs, and any of the number of half-life extending variants as is known in the art may find use in these bsAbs. Regardless of bsAb format, the CD28 bispecific antibodies are monovalent for CD28 and incorporate Fc variants engineered to ablate FcγR binding to avoid potential superagonism. Such Fc variants include those depicted in FIG. 5A and FIG. 5B.

### Example 4: CD19×CD3 bsAbs Deplete CD19⁺ Cells In Vitro

[0207] In a first experiment, first generation CD19×CD3 bsAbs (utilizing the CD19-OG binding domain and the H1.30_L1.47 or H1.32_L1.47 CD3 binding domains; sequences for which are depicted in FIG. 19A-FIG. 19C and FIG. 20A-FIG. 20AD) were incubated with CD19⁺ Ramos lymphoma cell line and CD19 depleted human PBMCs at a 10:1 effector:target ratio for 48 hours. The data as depicted in FIG. 21 show that the CD19×CD3 bsAbs exhibit highly efficacious cytotoxicity for CD19⁺ human lymphoma line.

### Example 5: CD19×CD3 bsAbs Deplete Peripheral B Cell In Vivo

[0208] Next, activity of the first generation CD19×CD3 bsAbs were investigated in vivo. Cynomolgus monkeys were dosed with various concentrations of the bsAbs, and peripheral, bone marrow, and lymph node B cell depletion was assessed (along with peripheral T cell activation, IL-6 release, and pharmacokinetics). The data as depicted in FIG. 22, FIG. 23, FIG. 25A, and FIG. 25B, show that B cell depletion was achieved with all of the CD19×CD3 bsAbs, although most robust with the 2+1 Fab₂-scFv-Fc format with CD3 High (XENP26982) which almost completely depletes B cells out to 14 days after dosing. T cell activation was similar among the bsAbs, although IL-6 release was consistently higher for bsAbs utilizing CD3 High (FIG. 24A and FIG. 24B). In data not shown, both CD4+ and CD8⁺ T cells exhibit similar trends in activation (CD69 and CD25). As depicted in FIG. 26, bsAbs could be measured in serum up to 4 weeks after dosing, although pharmacokinetics showed signs of ADA- or TMDD-mediated rapid clearance at ˜7-14 days. Notably as depicted in FIG. 27A and FIG. 27B, rapid clearance of CD19×CD3 bsAb coincide with early B cell recovery.

### Example 6: Re-Engineering CD19 Binding Domain

[0209] As described in Example 5, PK showed potential signs of ADA (albeit in cynomolgus monkeys), and so it may be important to modulate immunogenicity of the bsAbs. Accordingly, the CD19-OG binding domain was re-humanized (FIG. 28A and FIG. 28B). As depicted in FIG. 29, germline identities and 9mers were increased across both the VH and VL, while maintaining binding affinity. Another important property is the stability of the binding domains, especially if the CD19×CD3 bsAbs are to be used in a high concentration subcutaneous formulation. As depicted in FIG. 29, the re-humanized CD19 binding domain had +7° C. improved Tₘ. Notably, the A100Q substitution in the VL FR4 alone improved stability by 1° C. and removed a predicted MHC-binding peptide (data not shown). Additionally, a VL CDR2 methionine that may be liable to oxidation was substituted with alanine. Notably, the M51A substitution did not damage binding affinity. Collectively, the re-engineered CD19 binding domain contains 33 amino acid substitutions relative to the parental sequence.

### Example 7: Re-engineering CD3 Binding Domain

[0210] As described above, improving stability of the binding domains is important if the CD19×CD3 bsAbs are to be used in high concentrations subcutaneous formulations. Accordingly, the CD3 binding domains were engineered with disulfide bridges to improve stability in the context of an scFv. Data as depicted in FIG. 51 show that the engineered disulfide bridges increase Tm1 by ˜2-4° C. While the engineered disulfide bridges did result in increased stability, there was also some loss of affinity as depicted in FIG. 52.

[0211] Additionally, the CD3 binding domains utilized in Examples 4 and 5 include a non-canonical deamidation motif GNF at positions 96-98 (Kabat numbering) in the VH CDR3. In a first round of engineering, variants were made to remove this deamidation liability as well as to engineer stabilizing disulfide bridges. In data not shown from initial engineering, N97 was determined to be important for binding, but it was found that variants at N97 abrogated binding affinity (with the exception of N97Q which retains some binding). Variants at G96 was also important to binding, and G96E or G96T was found to improve binding affinity (albeit with decrease in stability by ˜2-4° C., as depicted in FIG. 51). And finally it was found that D100G improves affinity. Based on these (and the baseline that Y52cA and S100aE were affinity modulating variants already included in H1.32 and H1.89 respectively relative to H1.30), further variants were engineered to fix the deamidation and incorporate disulfide bridges while maintaining an affinity ladder similar to the original 3×CD3 binding domains and improved stability. Sequences for these variants are depicted in FIG. 17A-FIG. 17J, and affinity (in the context of 2+1 Fab₂-scFv-Fc molecules of FIG. 20A-FIG. 20AD) are depicted in FIG. 30. The data show that some of the re-engineered CD3 binding domains had binding affinity similar to the original CD3 binding domains, albeit with removal of the deamidation motif and introduction of stabilizing disulfide bridges.

### Example 8: Optimizing CD19×CD3 bsAbs

[0212] CD19×CD3 bsAbs were enhanced using the novel CD19 binding domains described in Example 6, novel CD3 binding domains in Example 7, and half-life extension Fc variants, sequences for which are depicted in FIG. 19A-FIG. 19C and FIG. 20A-FIG. 20AD.

### Example 8A: In Vitro Assessment

[0213] Activity of the first generation and enhanced CD19×CD3 bsAbs were assessed to determine whether the re-engineered CD19 and CD3 binding domains impacted activity. As before, the bsAbs were incubated with CD19⁺ Ramos cells as well as human or cynomolgus PBMCs. Data as depicted in FIG. 31, FIG. 32A-FIG. 32D, FIG. 33, and FIG. 34 show that bsAbs with the re-engineered binding domains have equivalent activity to the first generation bsAbs (with respect to target cell kill and T cell activation).

### Example 8B: In Vivo Assessment

[0214] The activity of the enhanced CD19×CD3 bsAbs were investigated in vivo. In a first study, cynomolgus monkeys were dosed intravenously with various concentrations (low 1× dose and high 3× dose) of the bsAbs, and peripheral, bone marrow, and lymph node B cell plasma depletion and pharmacokinetics was assessed, data for which are depicted in FIG. 35-FIGS. 43, 46, and 49 (cyno 3501 and 3506 are from separate studies). As before, the study was impacted by ADA across the bispecific antibodies, so animals impacted by ADA are denoted in FIG. 35. Half-life estimated were generally consistent between compartmental and non-compartmental analysis. Noting only the animals without ADA, XENP49657 has better half-life than XENP49654 (13.2 and 16.6 days vs. 13.0 days). Notably in cynomolgus monkey 1001 and 2002 which were not impacted by ADA, respectively dosed with bsAbs having old and new CD3 binding domain, depletion of B cells and plasma cells were similar. For cynomolgus monkeys 2002 and 3501 which were not impacted by ADA, both dosed with XENP49657 respectively at 1× and 3× dose, B cell depletion in peripheral blood was sustained for at least 28 days. Although XENP49665 also demonstrated effective depletion of B cells, it was dosed at much higher relative concentration, while XENP49659 demonstrated less B cell depletion despite 10× dose. Further as depicted in FIG. 38 and FIG. 39, the CD19×CD3 bsAbs, particularly XENP49657, promoted deep B cell depletion in bone marrow and lymph nodes. As depicted in FIG. 42, the bsAbs also deplete CD19+ plasma cells in bone marrow. As depicted in FIG. 43, XENP49657 significantly reduces serum immunoglobulin. As depicted in FIG. 46, XENP49657 exhibited half-life up to ˜15 days. Notably as depicted in FIG. 49, single intravenous dose XENP49657 results in deep B-cell depletion for at least 42 days.

[0215] In a second study, cynomolgus monkeys were dosed subcutaneously with high 3× dose of XENP49657, and peripheral B cell depletion and pharmacokinetics were assessed, data for which are depicted in FIG. 47 and FIG. 48. Consistent with intravenous dosing, single subcutaneous dose XENP49657 results in deep B-cell depletion sustained for at least 42 days, and half-life up to ˜15 days.

[0216] As depicted in FIG. 50, XENP49657 promotes depletion of CD19+ plasma cells in bone marrow.

### Example 9: Further Biophysical Characterization of Enhanced CD19×CD3 bsAbs

[0217] Affinity for human and cyno CD19 and CD3 were determined as follows. For CD19, human and cyno CD19-His were captured onto a CD5 chip pre-conjugated with anti-His capture mAb. Each antigen was captured at different density in order to achieve the desired response ranges suitable for kinetics. Dilution series of antibody were followed over each surface at 25° C. For CD3, amine couple human and cyno cd3/e were used, and bispecific antibodies were flowed at various concentrations. Melting temperature for the bispecific antibodies were also determined using DSC methods. Temperature was ramped from 25° C. to 95° C. at a rate of 1° C./min, and date were fit to a non-2 state model, with 3 transitions when appropriate. Data are collectively shown in FIG. 44.

[0218] Finally (data not shown), CD19×CD3 bsAb XENP49654 having the old CD3 binding domain was found to aggregate at higher concentrations, while XENP49657 and XENP49665 having stability-enhanced CD3 binding domains did not show such behavior.

### Example 10: CD19×CD3 bsAbs Deplete B Cells from Patients with RA

[0219] 0.3×10⁶ human PBMCs from healthy donors or donors with rheumatoid arthritis were incubated with varying concentrations of XENP49657 for 24 hours at 37° C. Cells were stained for 45 minutes at 4° C. followed by fixation and analysis by flow cytometry. Supernatant was used for cytokine analysis. Data, as depicted in FIG. 53, show that XENP49657 effectively depleted B cells from both healthy donors and donors with rheumatoid arthritis.

### Example 11: CD19×CD3 bsAbs Deplete B Cells from Patients with SLE

[0220] 0.3×10⁶ human PBMCs from healthy donors or donors with systemic lupus erythematosus were incubated with varying concentrations of XENP49657 for 24 hours at 37° C. Cells were stained for 45 minutes at 4° C. followed by fixation and analysis by flow cytometry. Supernatant was used for cytokine analysis. Data, as depicted in FIG. 54, show that XENP49657 effectively depleted B cells from both healthy donors and donors with systemic lupus erythematosus.

[0221] Those skilled in the art will appreciate that numerous changes and modifications can be made to the preferred variations or embodiments disclosed herein and that such changes and modifications can be made without departing from the spirit of the disclosure. It is, therefore, intended that the appended claims cover all such equivalent variations as fall within the true spirit and scope of the disclosure.

Sequence Table

| | | |
|---|---|---|
| Anti-CD19 | SEQ ID | SYVMH |
| First Subunit | NO: 1 | |
| CDR1 | | |
| Anti-CD19 | SEQ ID | YINPYNDGTKYNEKFQG |
| First Subunit | NO: 2 | |
| CDR2 | | |
| Anti-CD19 | SEQ ID | GTYYYGTRVFDY |
| First Subunit | NO: 3 | |
| CDR3 | | |
| Anti-CD19 | SEQ ID | RSSKSLQNVNGNTYLY |
| Second | NO: 4 | |
| Subunit CDR1 | | |
| Anti-CD19 | SEQ ID | RASNLNS |
| Second | NO: 5 | |
| Subunit CDR2 | | |
| Anti-CD19 | SEQ ID | MQHLEYPIT |
| Second | NO: 6 | |
| Subunit CDR3 | | |
| Anti-CD19 | SEQ ID | QVQLVQSGAEVKKPGASVKVSCKASGYTFTSYVMHWVR |
| First Subunit | NO: 7 | QAPGQGLEWMGYINPYNDGTKYNEKFQGRVTITSDKSTS |
| | | TAYMELSSLRSEDTAVYYCARGTYYYGTRVFDYWGQGT |
| | | LVTVSS |
| Anti-CD19 | SEQ ID | DIVMTQSPLSLPVTPGEPASISCRSSKSLQNVNGNTYLYWF |
| Second | NO: 8 | LQKPGQSPQLLIYRASNLNSGVPDRFSGSGSGTDFTLKISR |
| Subunit | | VEAEDVGVYYCMQHLEYPITFGQGTKLEIK |
| Anti-CD3 First | SEQ ID | TYAMN |
| Subunit CDR1 | NO: 9 | |
| Anti-CD3 | SEQ ID | RIRSKYNNYATYYADSVKG |
| First Subunit | NO: 10 | |
| CDR2a | | |
| Anti-CD3 | SEQ ID | RIRSKANNYATYYADSVKG |
| First Subunit | NO: 11 | |
| CDR2b | | |
| Anti-CD3 First | SEQ ID | HTNFGDSYVSWFAY |
| Subunit | NO: 12 | |
| CDR3a | | |
| Anti-CD3 First | SEQ ID | HTNFGGSYVSWFAY |
| Subunit | NO: 13 | |
| CDR3b | | |
| Anti-CD3 First | SEQ ID | HENFGDSYVSWFAY |
| Subunit | NO: 14 | |
| CDR3c | | |
| Anti-CD3 First | SEQ ID | HENFGGSYVSWFAY |
| Subunit | NO: 15 | |
| CDR3d | | |
| Anti-CD3 First | SEQ ID | HTNFGGEYVSWFAY |
| Subunit | NO: 16 | |
| CDR3e | | |
| Anti-CD3 | SEQ ID | GSSTGAVTTSNYAN |
| Second | NO: 17 | |
| Subunit CDR1 | | |
| Anti-CD3 | SEQ ID | GTNKRAP |
| Second | NO: 18 | |
| Subunit CDR2 | | |
| Anti-CD3 | SEQ ID | ALWYSNHWV |
| Second | NO: 19 | |
| Subunit CDR3 | | |
| Anti-CD19 | SEQ ID | QVQLVQSGAEVKKPGASVKVSCKASGYTFT |
| FR1 | NO: 20 | |
| Anti-CD19 | SEQ ID | WVRQAPGQGLEWMG |
| FR2 | NO: 21 | |
| Anti-CD19 | SEQ ID | RVTITSDKSTSTAYMELSSLRSEDTAVYYCAR |
| FR3 | NO: 22 | |
| Anti-CD19 | SEQ ID | WGQGTLVTVSS |
| FR4 | NO: 23 | |
| Anti-CD19 | SEQ ID | DIVMTQSPLSLPVTPGEPASISC |
| FR5 | NO: 24 | |
| Anti-CD19 | SEQ ID | WFLQKPGQSPQLLIY |
| FR6 | NO: 25 | |
| Anti-CD19 | SEQ ID | GVPDRFSGSGSGTDFTLKISRVEAEDVGVYYC |
| FR7 | NO: 26 | |
| Anti-CD19 | SEQ ID | FGQGTKLEIK |
| FR8 | NO: 27 | |
| Anti-CD3 FR1 | SEQ ID | EVQLVESGGGLVQPGGSLRLSCAASGFTFS |
| | NO: 28 | |
| Anti-CD3 FR2 | SEQ ID | WVRQAPGKCLEWVG |
| | NO: 29 | |
| Anti-CD3 FR3 | SEQ ID | RFTISRDDSKNTLYLQMNSLRAEDTAVYYCVR |
| | NO: 30 | |
| Anti-CD3 FR4 | SEQ ID | WGQGTLVTVSS |
| | NO: 31 | |
| Anti-CD3 FR5 | SEQ ID | QAVVTQEPSLTVSPGGTVTLTC |
| | NO: 32 | |
| Anti-CD3 FR6 | SEQ ID | WVQQKPGKSPRGLIG |
| | NO: 33 | |
| Anti-CD3 FR7 | SEQ ID | GVPARFSGSLLGGKAALTISGAQPEDEADYYC |
| | NO: 34 | |
| Anti-CD3 FR8 | SEQ ID | FGCGTKLTVL |
| | NO: 35 | |
| Anti-CD3 | SEQ ID | GKPGSGKPGSGKPGSGKPGS |
| Linker | NO: 36 | |
| Human CD3 | SEQ ID | MQSGTHWRVLGLCLLSVGVWGQDGNEEMGGITQTPYKVS |
| sequence | NO: 37 | ISGTTVILTCPQYPGSEILWQHNDKNIGGDEDDKNIGSDE |
| | | DHLSLKEFSELEQSGYYVCYPRGSKPEDANFYLYLRARVC |
| | | ENCMEMDVMSVATIVIVDICITGGLLLLVYYWSKNRKAK |
| | | AKPVTRGAGAGGRQRGQNKERPPPVPNPDYEPIRKGQRD |
| | | LYSGLNQRRI |
| Human CD3, | SEQ ID | DGNEEMGGITQTPYKVSISGTTVILTCPQYPGSEILWQHND |
| extracellular | NO: 38 | KNIGGDEDDKNIGSDEDHLSLKEFSELEQSGYYVCYPRGS |
| domain | | KPEDANFYLYLRARVCENCMEMD |
| Mouse CD3 | SEQ ID | MRWNTFWGILCLSLLAVGTCQDDAENIEYKVSISGTSVEL |
| sequence | NO: 39 | TCPLDSDENLKWEKNGQELPQKHDKHLVLQDFSEVEDSGY |
| | | YVCYTPASNKNTYLYLKARVCEYCVEVDLTAVAIIIIVDI |
| | | CITLGLLMVIYYWSKNRKAKAKPVTRGTGAGSRPRGQNK |
| | | ERPPPVPNPDYEPIRKGQRDLYSGLNQRAV |
| Mouse CD3, | SEQ ID | DAENIEYKVSISGTSVELTCPLDSDENLKWEKNGQELPQK |
| extracellular | NO: 40 | HDKHLVLQDFSEVEDSGYYVCYTPASNKNTYLYLKARVC |
| domain | | EYCVEVD |
| Cynomolgus | SEQ ID | MQSGTRWRVLGLCLLSIGVWGQDGNEEMGSITQTPYQVS |
| CD3 sequence | NO: 41 | ISGTTVILTCSQHLGSEAQWQHNGKNKEDSGDRLFLPEFS |
| | | EMEQSGYYVCYPRGSNPEDASHHLYLKARVCENCMEMDV |
| | | MAVATIVIVDICITLGLLLLVYYWSKNRKAKAKPVTRGAG |
| | | AGGRQRGQNKERPPPVPNPDYEPIRKGQQDLYSGLNQRRI |
| Cynomolgus | SEQ ID | QDGNEEMGSITQTPYQVSISGTTVILTCSQHLGSEAQWQH |
| CD3, | NO: 42 | NGKNKEDSGDRLFLPEFSEMEQSGYYVCYPRGSNPEDASH |
| extracellular | | HLYLKARVCENCMEMD |
| domain | | |
| Human CD19 | SEQ ID | MPPPRLLFFLLFLTPMEVRPEEPLVVKVEEGDNAVLQCLK |
| sequence | NO: 43 | GTSDGPTQQLTWSRESPLKPFLKLSLGLPGLGIHMRPLAI |
| | | WLFIFNVSQQMGGFYLCQPGPPSEKAWQPGWTVNVEGSGE |
| | | LFRWNVSDLGGLGCGLKNRSSEGPSSPSGKLMSPKLYVW |
| | | AKDRPEIWEGEPPCLPPRDSLNQSLSQDLTMAPGSTLWLS |
| | | CGVPPDSVSRGPLSWTHVHPKGPKSLLSLELKDDRPARDM |
| | | WVMETGLLLPRATAQDAGKYYCHRGNLTMSFHLEITARP |
| | | VLWHWLLRTGGWKVSAVTLAYLIFCLCSLVGILHLQRAL |
| | | VLRRKRKRMTDPTRRFFKVTPPPGSGPQNQYGNVLSLPTP |
| | | TSGLGRAQRWAAGLGGTAPSYGNPSSDVQADGALGSRSP |
| | | PGVGPEEEEGEGYEEPDSEEDSEFYENDSNLGQDQLSQDG |
| | | SGYENPEDEPLGPEDEDSFSNAESYENEDEELTQPVARTM |
| | | DFLSPHGSAWDPSREATSLGSQSYEDMRGILYAAPQLRSI |
| | | RGQPGPNHEEDADSYENMDNPDGPDPAWGGGGRMGTWST |
| | | R |
| Human CD19 | SEQ ID | PEEPLVVKVEEGDNAVLQCLKGTSDGPTQQLTWSRESPLK |
| sequence, | NO: 44 | PFLKLSLGLPGLGIHMRPLAIWLFIFNVSQQMGGFYLCQPG |
| extracellular | | PPSEKAWQPGWTVNVEGSGELFRWNVSDLGGLGCGLKN |
| domain | | RSSEGPSSPSGKLMSPKLYVWAKDRPEIWEGEPPCLPPRDS |
| | | LNQSLSQDLTMAPGSTLWLSCGVPPDSVSRGPLSWTHVHP |
| | | KGPKSLLSLELKDDRPARDMWVMETGLLLPRATAQDAG |
| | | KYYCHRGNLTMSFHLEITARPVLWHWLLRTGGWK |
| Mouse CD19 | SEQ ID | MPSPLPVSFLLFLTLVGGRPQKSLLVEVEEGGNVVLPCLPD |
| sequence | NO: 45 | SSPVSSEKLAWYRGNQSTPFLELSPGSPGLGLHVGSLGILL |
| | | VIVNVSDHMGGFYLCQKRPPFKDIWQPAWTVNVEDSGEM |
| | | FRWNASDVRDLDCDLRNRSSGSHRSTSGSQLYVWAKDHP |
| | | KVWGTKPVCAPRGSSLNQSLINQDLTVAPGSTLWLSCGVP |
| | | PVPVAKGSISWTHVHPRRPNVSLLSLSLGGEHPVREMWV |
| | | WGSLLLLPQATALDEGTYYCLRGNLTIERHVKVIARSAV |
| | | WLWLLRTGGWIVPVVTLVYVIFCMVSLVAFLYCQRAFILR |
| | | RKRKRMTDPARRFFKVTPPSGNGTQNQYGNVLSLPTSTSG |
| | | QAHAQRWAAGLGSVPGSYGNPRIQVQDTGAQSHETGLEE |
| | | EGEAYEEPDSEEGSEFYENDSNLGQDQVSQDGSGYENPED |
| | | EPMGPEEEDSFSNAESYENADEELAQPVGRMMDFLSPHGS |
| | | AWDPSREASSLGSQSYEDMRGILYAAPQLHSIQSGPSHEE |
| | | DADSYENMDKSDDLEPAWEGEGHMGTWGTT |
| Mouse CD19 | SEQ ID | RPQKSLLVEVEEGGNVVLPCLPDSSPVSSEKLAWYRGNQS |
| sequence, | NO: 46 | TPFLELSPGSPGLGLHVGSLGILLVIVNVSDHMGGFYLCQ |
| extracellular | | KRPPFKDIWQPAWTVNVEDSGEMFRWNASDVRDLDCDLR |
| domain | | NRSSGSHRSTSGSQLYVWAKDHPKVWGTKPVCAPRGSSL |
| | | NQSLINQDLTVAPGSTLWLSCGVPPVPVAKGSISWTHVHP |
| | | RRPNVSLLSLSLGGEHPVREMWVWGSLLLLPQATALDEG |
| | | TYYCLRGNLTIERHVKVIARSAVWLWLLRTGG |
| Macaca | SEQ ID | MPPPCLLFFLLFLTPMEVRPQEPLVVKVEEGDNAVLQCLE |
| fascicularis | NO: 47 | GTSDGPTQQLVWCRDSPFEPFLNLSLGLPGMGIRMGPLGI |
| CD19 | | WLLIFNVSNQTGGFYLCQPGLPSEKAWQPGWTVSVEGSG |
| sequence | | ELFRWNVSDLGGLGCGLKNRSSEGPSSPSGKLNSSQLYVW |
| | | AKDRPEMWEGEPVCGPPRDSLNQSLSQDLTMAPGSTLWL |
| | | SCGVPPDSVSRGPLSWTHVRPKGPKSSLLSLELKDDRPDR |
| | | DMWVVDTGLLLTRATAQDAGKYYCHRGNWTKSFYLEIT |
| | | ARPALWHWLLRIGGWKVPAVTLTYLIFCLCSLVGILQLQR |
| | | ALVLRRKRKRMTDPTRRFFKVTPPPGSGPQNQYGNVLSLP |
| | | TPTSGLGRAQRWAAGLGGTAPSYGNPSSDVQVDGAVGSR |
| | | SPPGAGPEEEEGEGYEEPDSEEGSEFYENDSNFGQDQLSQD |
| | | GSGYENPEDEPLGPEDEDSFSNAESYENEDEELTQPVART |
| | | MDFLSPHGSAWDPSREATSLGSQSYEDMRGLLYAAPQLR |
| | | TIRGQPGPNHEEDADSYENMDNPDGPDPAWGGGGRMGT |
| | | WSAR |
| Macaca | SEQ ID | PQEPLVVKVEEGDNAVLQCLEGTSDGPTQQLVWCRDSPF |
| fascicularis | NO: 48 | EPFLNLSLGLPGMGIRMGPLGIWLLIFNVSNQTGGFYLCQ |
| CD19 | | PGLPSEKAWQPGWTVSVEGSGELFRWNVSDLGGLGCGLK |
| sequence, | | NRSSEGPSSPSGKLNSSQLYVWAKDRPEMWEGEPVCGPPR |
| extracellular | | DSLNQSLSQDLTMAPGSTLWLSCGVPPDSVSRGPLSWTHV |
| domain | | RPKGPKSSLLSLELKDDRPDRDMWVVDTGLLLTRATAQD |
| (predicted) | | AGKYYCHRGNWTKSFYLEITARPALWHWLLRIGGWK |
| Gly-Ser 15 | SEQ ID | GGGGSGGGGSGGGGS |
| linker | NO: 49 | |
| Whitlow linker | SEQ ID | GSTSGSGKPGSGEGSTKG |
| | NO: 50 | |
| 6paxA_1 (+A) | SEQ ID | IRPRAIGGSKPRVA |
| linker | NO: 51 | |
| +B linker | SEQ ID | GKGGSGKGGSGKGGS |
| | NO: 52 | |
| +C linker | SEQ ID | GGKGSGGKGSGGKGS |
| | NO: 53 | |
| +D linker | SEQ ID | GGGKSGGGKSGGGKS |
| | NO: 54 | |
| +E linker | SEQ ID | GKGKSGKGKSGKGKS |
| | NO: 55 | |
| +F linker | SEQ ID | GGGKSGGKGSGKGGS |
| | NO: 56 | |
| +G linker | SEQ ID | GKPGSGKPGSGKPGS |
| | NO: 57 | |
| +H linker | SEQ ID | GKPGSGKPGSGKPGSGKPGS |
| | NO: 58 | |
| +I linker | SEQ ID | GKGKSGKGKSGKGKSGKGKS |
| | NO: 59 | |
| Gly-Ser 20 | SEQ ID | GGGGSGGGGSGGGGSGGGGS |
| linker | NO: 60 | |
| 3hsc_2 (−A) | SEQ ID | STAGDTHLGGEDFD |
| linker | NO: 61 | |
| −B linker | SEQ ID | GEGGSGEGGSGEGGS |
| | NO: 62 | |
| −C linker | SEQ ID | GEGGSGEGGSGEGGS |
| | NO: 63 | |
| −D linker | SEQ ID | GGGESGGGESGGGES |
| | NO: 64 | |
| −E linker | SEQ ID | GEGESGEGESGEGES |
| | NO: 65 | |
| −F linker | SEQ ID | GGGESGGEGSGEGGS |
| | NO: 66 | |
| −G linker | SEQ ID | GEGESGEGESGEGESGEGES |
| | NO: 67 | |
| Add1 linker | SEQ ID | GGGGSGGGGSGGGGS |
| | NO: 68 | |
| Add2 linker | SEQ ID | GGGGSGGGGSGGGGSGGGGS |
| | NO: 69 | |
| Add3 linker | SEQ ID | GSTSGSGKPGSGEGSTKG |
| | NO: 70 | |
| Add4 linker | SEQ ID | PRGASKSGSASQTGSAPGS |
| | NO: 71 | |
| Add5 linker | SEQ ID | GTAAAGAGAAGGAAAGAAG |
| | NO: 72 | |
| Add6 linker | SEQ ID | GTSGSSGSGSGGSGSGGGG |
| | NO: 73 | |
| Add7 linker | SEQ ID | GKPGSGKPGSGKPGSGKPGS |
| | NO: 74 | |
| EB linker | SEQ ID | GGSEGKSSGSGSESKSTGGS |
| | NO: 75 | |
| Staple linker | SEQ ID | GGGSGGSGGCPPCGGSGG |
| | NO: 76 | |
| (GGGGS)₁ | SEQ ID | GGGGS |
| | NO: 77 | |
| (GGGGS)₂ | SEQ ID | GGGGSGGGGS |
| | NO: 78 | |
| (GGGGS)₃ | SEQ ID | GGGGSGGGGSGGGGS |
| | NO: 79 | |
| (GGGGS)₄ | SEQ ID | GGGGSGGGGSGGGGSGGGGS |
| | NO: 80 | |
| (GGGGS)₅ | SEQ ID | GGGGSGGGGSGGGGSGGGGSGGGGS |
| | NO: 81 | |
| (GGGGS)₆ | SEQ ID | GGGGSGGGGSGGGGSGGGGSGGGGSGGGGS |
| | NO: 82 | |
| (GGGGS)₇ | SEQ ID | GGGGSGGGGSGGGGSGGGGSGGGGSGGGGSGGGGS |
| | NO: 83 | |
| (GGGGA)₁ | SEQ ID | GGGGA |
| | NO: 84 | |
| (GGGGA)₂ | SEQ ID | GGGGAGGGGA |
| | NO: 85 | |
| (GGGGA)₃ | SEQ ID | GGGGAGGGGAGGGGA |
| | NO: 86 | |
| (GGGGA)₄ | SEQ ID | GGGGAGGGGAGGGGAGGGGA |
| | NO: 87 | |
| (GGGGA)₅ | SEQ ID | GGGAGGGGAGGGGAGGGGAGGGGA |
| | NO: 88 | |
| (GGGGA)₆ | SEQ ID | GGGGAGGGGAGGGGAGGGGAGGGGAGGGGA |
| | NO: 89 | |
| (GGGGA)₇ | SEQ ID | GGGGAGGGGAGGGGAGGGGAGGGGAGGGGAGGGGA |
| | NO: 90 | |
| 30AA-linker | SEQ ID | DPALVHQRPAPPGGGGSGGGGSGGGGSGGG |
| | NO: 91 | |
| (GKPGS)₁ | SEQ ID | GKPGS |
| | NO: 92 | |
| (GKPGS)₅ | SEQ ID | GKPGSGKPGSGKPGSGKPGSGKPGS |
| | NO: 93 | |
| (GKPGS)₆ | SEQ ID | GKPGSGKPGSGKPGSGKPGSGKPGSGKPGS |
| | NO: 94 | |
| (GGGES)₁ | SEQ ID | GGGES |
| | NO: 95 | |
| “Full hinge” | SEQ ID | EPKSCDKTHTCPPCP |
| | NO: 96 | |
| “Lower half | SEQ ID | KTHTCPPCP |
| hinge” | NO: 97 | |
| “Full hinge | SEQ ID | EPKSSDKTHTCPPCP |
| C220S variant” | NO: 98 | |
| “Flex lower | SEQ ID | GGGGSGGGGSKTHTCPPCP |
| half hinge” | NO: 99 | |
| “Charged | SEQ ID | GKPGSGKPGSKTHTCPPCP |
| lower half | NO: 100 | |
| hinge1” | | |
| “Charged | SEQ ID | GKPGSKTHTCPPCP |
| lower half | NO: 101 | |
| hinge2” | | |
| “Upper half | SEQ ID | EPKSC |
| hinge” | NO: 102 | |
| “Flex upper | SEQ ID | EPKSCGGGGSGGGGS |
| half hinge” | NO: 103 | |
| “Charged | SEQ ID | EPKSCGKPGSGKPGS |
| upper half | NO: 104 | |
| hinge1” | | |
| “Charged | SEQ ID | EPKSCGKPGS |
| upper half | NO: 105 | |
| hinge2” | | |
| Heterodimeric | SEQ ID | APPVAGPSVFLFPPKPKDTLMISRTPEVTCVVVDVKHEDP |
| Fc Backbone 1 | NO: 106 | EVKFNWYVDGVEVHNAKTKPREEEYNSTYRVVSVLTVLH |
| monomer 1 (−) | | QDWLNGKEYKCKVSNKALPAPIEKTISKAKGQPREPQVYT |
| | | LPPSREEMTKNQVSLTCDVSGFYPSDIAVEWESDGQPENN |
| | | YKTTPPVLDSDGSFFLYSKLTVDKSRWEQGDVFSCSVMHE |
| | | ALHNHYTQKSLSLSPGK |
| Heterodimeric | SEQ ID | APPVAGPSVFLFPPKPKDTLMISRTPEVTCVVVDVKHEDPE |
| Fc Backbone 1 | NO: 107 | VKFNWYVDGVEVHNAKTKPREEQYNSTYRVVSVLTVLH |
| monomer 2 (+) | | QDWLNGKEYKCKVSNKALPAPIEKTISKAKGQPREPQVYT |
| | | LPPSREQMTKNQVKLTCLVKGFYPSDIAVEWESNGQPENN |
| | | YKTTPPVLDSDGSFFLYSKLTVDKSRWQQGNVFSCSVMH |
| | | EALHNHYTQKSLSLSPGK |
| Heterodimeric | SEQ ID | APPVAGPSVFLFPPKPKDTLMISRTPEVTCVVVDVKHEDPE |
| Fc Backbone 2 | NO: 108 | VKFNWYVDGVEVHNAKTKPREEEYNSTYRVVSVLTVLH |
| monomer 1 (−) | | QDWLNGKEYKCKVSNKALPAPIEKTISKAKGQPREPQVYT |
| | | LPPSREEMTKNQVSLTCDVSGFYPSDIAVEWESDGQPENN |
| | | YKTTPPVLDSDGSFFLYSKLTVDKSRWEQGDVFSCSVMHE |
| | | ALHNHYTQKSLSLSPGK |
| Heterodimeric | SEQ ID | APPVAGPSVFLFPPKPKDTLMISRTPEVTCVVVDVKHEDPE |
| Fc Backbone | NO: 109 | VKFNWYVDGVEVHNAKTKPREEQYNSTYRVVSVLTVLH |
| monomer 2 (+) | | QDWLNGKEYKCKVSNKALPAPIEKTISKAKGQPREPQVYT |
| | | LPPSREEMTKNQVKLTCLVKGFYPSDIAVEWESNGQPENN |
| | | YKTTPPVLDSDGSFFLYSKLTVDKSRWQQGNVFSCSVMH |
| | | EALHNHYTQKSLSLSPGK |
| Heterodimeric | SEQ ID | APPVAGPSVFLFPPKPKDTLMISRTPEVTCVVVDVKHEDPE |
| Fc Backbone 3 | NO: 110 | VKFNWYVDGVEVHNAKTKPREEEYNSTYRVVSVLTVLH |
| monomer 1 (−) | | QDWLNGKEYKCKVSNKALPAPIEKTISKAKGQPREPQVYT |
| | | LPPSREEMTKNQVSLTCEVSGFYPSDIAVEWESDGQPENN |
| | | YKTTPPVLDSDGSFFLYSKLTVDKSRWEQGDVFSCSVMHE |
| | | ALHNHYTQKSLSLSPGK |
| Heterodimeric | SEQ ID | APPVAGPSVFLFPPKPKDTLMISRTPEVTCVVVDVKHEDPE |
| Fc Backbone 3 | NO: 111 | VKFNWYVDGVEVHNAKTKPREEQYNSTYRVVSVLTVLH |
| monomer 2 (+) | | QDWLNGKEYKCKVSNKALPAPIEKTISKAKGQPREPQVYT |
| | | LPPSREEMTKNQVKLTCLVKGFYPSDIAVEWESNGQPENN |
| | | YKTTPPVLDSDGSFFLYSKLTVDKSRWQQGNVFSCSVMH |
| | | EALHNHYTQKSLSLSPGK |
| Heterodimeric | SEQ ID | APPVAGPSVFLFPPKPKDTLMISRTPEVTCVVVDVKHEDPE |
| Fc Backbone 4 | NO: 112 | VKFNWYVDGVEVHNAKTKPREEEYNSTYRVVSVLTVLH |
| monomer 1 (−) | | QDWLNGKEYKCKVSNKALPAPIEKTISKAKGQPREPQVYT |
| | | LPPSREEMTENEVSLTCLVKGFYPSDIAVEWESDGQPENN |
| | | YKTTPPVLDSDGSFFLYSKLEVDKSRWEQGDVFSCSVMHE |
| | | ALHNHYTQKSLSLSPGK |
| Heterodimeric | SEQ ID | APPVAGPSVFLFPPKPKDTLMISRTPEVTCVVVDVKHEDPE |
| Fc Backbone 4 | NO: 113 | VKFNWYVDGVEVHNAKTKPREEQYNSTYRVVSVLTVLH |
| monomer 2 (+) | | QDWLNGKEYKCKVSNKALPAPIEKTISKAKGQPREPQVYT |
| | | LPPSREEMTKNQVSLTCLVKGFYPSDIAVEWESNGQPENN |
| | | YKTTPPVLDSKGSFFLYSKLTVDKSRWQQGNVFSCSVMH |
| | | EALHNHYTQKSLSLSPGK |
| Heterodimeric | SEQ ID | APPVAGPSVFLFPPKPKDTLMISRTPEVTCVVVDVKHEDPE |
| Fc Backbone 5 | NO: 114 | VKFNWYVDGVEVHNAKTKPREEEYNSTYRVVSVLTVLH |
| monomer 1 (−) | | QDWLNGKEYKCKVSNKALPAPIEKTISKAKGQPREPQVYT |
| | | LPPSRDELTKNQVSLTCDVSGFYPSDIAVEWESDGQPENN |
| | | YKTTPPVLDSDGSFFLYSKLTVDKSRWEQGDVFSCSVMHE |
| | | ALHNHYTQKSLSLSPGK |
| Heterodimeric | SEQ ID | APPVAGPSVFLFPPKPKDTLMISRTPEVTCVVVDVKHEDPE |
| Fc Backbone 5 | NO: 115 | VKFNWYVDGVEVHNAKTKPREEQYNSTYRVVSVLTVLH |
| monomer 2 (+) | | QDWLNGKEYKCKVSNKALPAPIEKTISKAKGQPREPQVYT |
| | | LPPSRDQLTKNQVKLTCLVKGFYPSDIAVEWESNGQPENN |
| | | YKTTPPVLDSDGSFFLYSKLTVDKSRWQQGNVFSCSVMH |
| | | EALHNHYTQKSLSLSPGK |
| Heterodimeric | SEQ ID | APPVAGPSVFLFPPKPKDTLMISRTPEVTCVVVDVKHEDPE |
| Fc Backbone 6 | NO: 116 | VKFNWYVDGVEVHNAKTKPREEEYASTYRVVSVLTVLH |
| monomer 1 (−) | | QDWLNGKEYKCKVSNKALPAPIEKTISKAKGQPREPQVYT |
| | | LPPSREEMTKNQVSLTCDVSGFYPSDIAVEWESDGQPENN |
| | | YKTTPPVLDSDGSFFLYSKLTVDKSRWEQGDVFSCSVMHE |
| | | ALHNHYTQKSLSLSPGK |
| Heterodimeric | SEQ ID | APPVAGPSVFLFPPKPKDTLMISRTPEVTCVVVDVKHEDPE |
| Fc Backbone 6 | NO: 117 | VKFNWYVDGVEVHNAKTKPREEQYASTYRVVSVLTVLH |
| monomer 2 (+) | | QDWLNGKEYKCKVSNKALPAPIEKTISKAKGQPREPQVYT |
| | | LPPSREQMTKNQVKLTCLVKGFYPSDIAVEWESNGQPENN |
| | | YKTTPPVLDSDGSFFLYSKLTVDKSRWQQGNVFSCSVMH |
| | | EALHNHYTQKSLSLSPGK |
| Heterodimeric | SEQ ID | APPVAGPSVFLFPPKPKDTLMISRTPEVTCVVVDVKHEDPE |
| Fc Backbone 7 | NO: 118 | VKFNWYVDGVEVHNAKTKPREEEYSSTYRVVSVLTVLHQ |
| monomer 1 (−) | | DWLNGKEYKCKVSNKALPAPIEKTISKAKGQPREPQVYTL |
| | | PPSREEMTKNQVSLTCDVSGFYPSDIAVEWESDGQPENNY |
| | | KTTPPVLDSDGSFFLYSKLTVDKSRWEQGDVFSCSVMHEA |
| | | LHNHYTQKSLSLSPGK |
| Heterodimeric | SEQ ID | APPVAGPSVFLFPPKPKDTLMISRTPEVTCVVVDVKHEDPE |
| Fc Backbone 7 | NO: 119 | VKFNWYVDGVEVHNAKTKPREEQYSSTYRVVSVLTVLH |
| monomer 2 (+) | | QDWLNGKEYKCKVSNKALPAPIEKTISKAKGQPREPQVYT |
| | | LPPSREQMTKNQVKLTCLVKGFYPSDIAVEWESNGQPENN |
| | | YKTTPPVLDSDGSFFLYSKLTVDKSRWQQGNVFSCSVMH |
| | | EALHNHYTQKSLSLSPGK |
| Heterodimeric | SEQ ID | APEFLGGPSVFLFPPKPKDTLMISRTPEVTCVVVDVSQEDP |
| Fc Backbone 8 | NO: 120 | EVQFNWYVDGVEVHNAKTKPREEEFNSTYRVVSVLTVLH |
| monomer 1 (−) | | QDWLNGKEYKCKVSNKGLPSSIEKTISKAKGQPREPQVYT |
| | | LPPSQEEMTKNQVSLTCDVSGFYPSDIAVEWESDGQPENN |
| | | YKTTPPVLDSDGSFFLYSRLTVDKSRWEEGDVFSCSVMHE |
| | | ALHNHYTQKSLSLSLGK |
| Heterodimeric | SEQ ID | APEFLGGPSVFLFPPKPKDTLMISRTPEVTCVVVDVSQEDP |
| Fc Backbone 8 | NO: 121 | EVQFNWYVDGVEVHNAKTKPREEQFNSTYRVVSVLTVLH |
| monomer 2 (+) | | QDWLNGKEYKCKVSNKGLPSSIEKTISKAKGQPREPQVYT |
| | | LPPSQEQMTKNQVKLTCLVKGFYPSDIAVEWESNGQPEN |
| | | NYKTTPPVLDSDGSFFLYSRLTVDKSRWQEGNVFSCSVM |
| | | HEALHNHYTQKSLSLSLGK |
| Heterodimeric | SEQ ID | APPVAGPSVFLFPPKPKDTLMISRTPEVTCVVVDVSHEDPE |
| Fc Backbone 9 | NO: 122 | VQFNWYVDGVEVHNAKTKPREEEFNSTFRVVSVLTVVHQ |
| monomer 1 (−) | | DWLNGKEYKCKVSNKGLPAPIEKTISKTKGQPREPQVYTL |
| | | PPSREEMTKNQVSLTCDVSGFYPSDIAVEWESDGQPENNY |
| | | KTTPPMLDSDGSFFLYSKLTVDKSRWEQGDVFSCSVMHE |
| | | ALHNHYTQKSLSLSPGK |
| Heterodimeric | SEQ ID | APPVAGPSVFLFPPKPKDTLMISRTPEVTCVVVDVSHEDPE |
| Fc Backbone 9 | NO: 123 | VQFNWYVDGVEVHNAKTKPREEQFNSTFRVVSVLTVVH |
| monomer 2 (+) | | QDWLNGKEYKCKVSNKGLPAPIEKTISKTKGQPREPQVYT |
| | | LPPSREQMTKNQVKLTCLVKGFYPSDIAVEWESNGQPENN |
| | | YKTTPPMLDSDGSFFLYSKLTVDKSRWQQGNVFSCSVMH |
| | | EALHNHYTQKSLSLSPGK |
| Heterodimeric | SEQ ID | APPVAGPSVFLFPPKPKDTLMISRTPEVTCVVVDVKHEDPE |
| Fc Backbone | NO: 124 | VQFNWYVDGVEVHNAKTKPREEEFNSTFRVVSVLTVVHQ |
| 10 monomer 1 | | DWLNGKEYKCKVSNKGLPAPIEKTISKTKGQPREPQVYTL |
| (−) | | PPSREEMTKNQVSLTCDVSGFYPSDIAVEWESDGQPENNY |
| | | KTTPPMLDSDGSFFLYSKLTVDKSRWEQGDVFSCSVMHE |
| | | ALHNHYTQKSLSLSPGK |
| Heterodimeric | SEQ ID | APPVAGPSVFLFPPKPKDTLMISRTPEVTCVVVDVKHEDPE |
| Fc Backbone | NO: 125 | VQFNWYVDGVEVHNAKTKPREEQFNSTFRVVSVLTVVH |
| 10 monomer 2 | | QDWLNGKEYKCKVSNKGLPAPIEKTISKTKGQPREPQVYT |
| (+) | | LPPSREQMTKNQVKLTCLVKGFYPSDIAVEWESNGQPENN |
| | | YKTTPPMLDSDGSFFLYSKLTVDKSRWQQGNVFSCSVMH |
| | | EALHNHYTQKSLSLSPGK |
| Heterodimeric | SEQ ID | APPVAGPSVFLFPPKPKDTLMISRTPEVTCVVVDVKHEDPE |
| Fc Backbone | NO: 126 | VKFNWYVDGVEVHNAKTKPREEEYNSTYRVVSVLTVLH |
| 11 monomer 1 | | QDWLNGKEYKCKVSNKALPAPIEKTISKAKGQPREPQVYT |
| (−) | | LPPSREEMTKNQVSLTCDVSGFYPSDIAVEWESDGQPENN |
| | | YKTTPPVLDSDGSFFLYSKLTVDKSRWEQGDVFSCSVLHE |
| | | ALHSHYTQKSLSLSPGK |
| Heterodimeric | SEQ ID | APPVAGPSVFLFPPKPKDTLMISRTPEVTCVVVDVKHEDPE |
| Fc Backbone | NO: 127 | VKFNWYVDGVEVHNAKTKPREEQYNSTYRVVSVLTVLH |
| 11 monomer 2 | | QDWLNGKEYKCKVSNKALPAPIEKTISKAKGQPREPQVYT |
| (+) | | LPPSREQMTKNQVKLTCLVKGFYPSDIAVEWESNGQPENN |
| | | YKTTPPVLDSDGSFFLYSKLTVDKSRWQQGNVFSCSVLHE |
| | | ALHSHYTQKSLSLSPGK |
| Heterodimeric | SEQ ID | APPVAGPSVFLFPPKPKDTLMISRTPEVTCVVVDVKHEDPE |
| Fc Backbone | NO: 128 | VKFKWYVDGVEVHNAKTKPREEQYNSTYRVVSVLTVLH |
| 12 monomer 1 | | QDWLNGKEYKCKVSNKALPAPIEKTISKAKGQPREPQVYT |
| (−) | | LPPSREQMTKNQVKLTCLVKGFYPSDIAVEWESNGQPENN |
| | | YKTTPPVLDSDGSFFLYSKLTVDKSRWQQGNVFSCSVMH |
| | | EALHNHYTQKSLSLSPGK |
| Heterodimeric | SEQ ID | APPVAGPSVFLFPPKPKDTLMISRTPEVTCVVVDVKHEDPE |
| Fc Backbone | NO: 129 | VKFNWYVDGVEVHNAKTKPREEEYNSTYRVVSVLTVLH |
| 12 monomer 2 | | QDWLNGKEYKCKVSNKALPAPIEKTISKAKGQPREPQVYT |
| (+) | | LPPSREEMTKNQVSLTCDVSGFYPSDIAVEWESDGQPENN |
| | | YKTTPPVLDSDGSFFLYSKLTVDKSRWEQGDVFSCSVMHE |
| | | ALHNHYTQKSLSLSPGK |
| Heterodimeric | SEQ ID | APEAAGGPSVFLFPPKPKDTLMISRTPEVTCVVVSVSHEDP |
| Fc Backbone | NO: 130 | EVKFNWYVDGVEVHNAKTKPREEQYNSTYRVVSVLTVL |
| 13 monomer 1 | | HQDWLNGKEYKCKVSNKALPAPIEKTISKAKGQPREPQV |
| | | YTLPPSREEMTKNQVSLWCLVKGFYPSDIAVEWESNGQPE |
| | | NNYKTTPPVLDSDGSFFLYSKLTVDKSRWQQGNVFSCSV |
| | | MHEALHNHYTQKSLSLSPGK |
| Heterodimeric | SEQ ID | APEAAGGPSVFLFPPKPKDTLMISRTPEVTCVVVSVSHEDP |
| Fc Backbone | NO: 131 | EVKFNWYVDGVEVHNAKTKPREEQYNSTYRVVSVLTVL |
| 13 monomer 2 | | HQDWLNGKEYKCKVSNKALPAPIEKTISKAKGQPREPQV |
| | | YTLPPSREEMTKNQVSLSCAVKGFYPSDIAVEWESNGQPE |
| | | NNYKTTPPVLDSDGSFFLVSKLTVDKSRWQQGNVFSCSV |
| | | MHEALHNRFTQKSLSLSPGK |
| Heterodimeric | SEQ ID | APEAAGGPSVFLFPPKPKDTLYITREPEVTCVVVSVSHEDP |
| Fc Backbone | NO: 132 | EVKFNWYVDGVEVHNAKTKPREEQYNSTYRVVSVLTVL |
| 14 monomer 1 | | HQDWLNGKEYKCKVSNKALPAPIEKTISKAKGQPREPQV |
| | | YTLPPSREEMTKNQVSLWCLVKGFYPSDIAVEWESNGQPE |
| | | NNYKTTPPVLDSDGSFFLYSKLTVDKSRWQQGNVFSCSV |
| | | MHEALHNHYTQKSLSLSPGK |
| Heterodimeric | SEQ ID | APEAAGGPSVFLFPPKPKDTLYITREPEVTCVVVSVSHEDP |
| Fc Backbone | NO: 133 | EVKFNWYVDGVEVHNAKTKPREEQYNSTYRVVSVLTVL |
| 14 monomer 2 | | HQDWLNGKEYKCKVSNKALPAPIEKTISKAKGQPREPQV |
| | | YTLPPSREEMTKNQVSLSCAVKGFYPSDIAVEWESNGQPE |
| | | NNYKTTPPVLDSDGSFFLVSKLTVDKSRWQQGNVFSCSV |
| | | MHEALHNRFTQKSLSLSPGK |
| Heterodimeric | SEQ ID | APPVAGPSVFLFPPKPKDTLMISRTPEVTCVVVDVKHEDPE |
| Fc Backbone | NO: 134 | VKFNWYVDGVEVHNAKTKPREEEYNSTYRVVSVLTVLH |
| 15 monomer 1 | | QDWLNGKEYKCKVSNKALPAPIEKTISKAKGQPREPQVYT |
| | | LPPSRDELTKNQVSLTCDVSGFYPSDIAVEWESDGQPENN |
| | | YKTTPPVLDSDGSFFLYSKLTVDKSRWEQGDVFSCSVLHE |
| | | ALHSHYTQKSLSLSPGK |
| Heterodimeric | SEQ ID | APPVAGPSVFLFPPKPKDTLMISRTPEVTCVVVDVKHEDPE |
| Fc Backbone | NO: 135 | VKFNWYVDGVEVHNAKTKPREEQYNSTYRVVSVLTVLH |
| 15 monomer 2 | | QDWLNGKEYKCKVSNKALPAPIEKTISKAKGQPREPQVYT |
| | | LPPSRDQLTKNQVKLTCLVKGFYPSDIAVEWESNGQPENN |
| | | YKTTPPVLDSDGSFFLYSKLTVDKSRWQQGNVFSCSVLHE |
| | | ALHSHYTQKSLSLSPGK |
| Heterodimeric | SEQ ID | APPVAGPSVFLFPPKPKDTLMISRTPEVTCVVVDVKHEDPE |
| Fc Backbone | NO: 136 | VKFNWYVDGVEVHNAKTKPREEEYNSTYRVVSVLTVLH |
| 16 monomer 1 | | QDWLNGKEYKCKVSNKALPAPIEKTISKAKGQPREPQVYT |
| | | LPPSREEMTKNQVSLTCDVSGFYPSDIAVEWESDGQPENN |
| | | YKTTPPVLDSDGSFFLYSKLTVDKSRWEQGDVFSCSVLHE |
| | | ALHAHYTQKSLSLSPGK |
| Heterodimeric | SEQ ID | APPVAGPSVFLFPPKPKDTLMISRTPEVTCVVVDVKHEDPE |
| Fc Backbone | NO: 137 | VKFNWYVDGVEVHNAKTKPREEQYNSTYRVVSVLTVLH |
| 16 monomer 2 | | QDWLNGKEYKCKVSNKALPAPIEKTISKAKGQPREPQVYT |
| | | LPPSREQMTKNQVKLTCLVKGFYPSDIAVEWESNGQPENN |
| | | YKTTPPVLDSDGSFFLYSKLTVDKSRWQQGNVFSCSVLHE |
| | | ALHAHYTQKSLSLSPGK |
| Heterodimeric | SEQ ID | APPVAGPSVFLFPPKPKDTLMISRTPEVTCVVVDVKHEDPE |
| Fc Backbone | NO: 138 | VKFNWYVDGVEVHNAKTKPREEEYNSTYRVVSVLTVLH |
| 17 monomer 1 | | QDWLNGKEYKCKVSNKALPAPIEKTISKAKGQPREPQVYT |
| | | LPPSRDELTKNQVSLTCDVSGFYPSDIAVEWESDGQPENN |
| | | YKTTPPVLDSDGSFFLYSKLTVDKSRWEQGDVFSCSVLHE |
| | | ALHAHYTQKSLSLSPGK |
| Heterodimeric | SEQ ID | APPVAGPSVFLFPPKPKDTLMISRTPEVTCVVVDVKHEDPE |
| Fc Backbone | NO: 139 | VKFNWYVDGVEVHNAKTKPREEQYNSTYRVVSVLTVLH |
| 17 monomer 2 | | QDWLNGKEYKCKVSNKALPAPIEKTISKAKGQPREPQVYT |
| | | LPPSRDQLTKNQVKLTCLVKGFYPSDIAVEWESNGQPENN |
| | | YKTTPPVLDSDGSFFLYSKLTVDKSRWQQGNVFSCSVLHE |
| | | ALHAHYTQKSLSLSPGK |
| IgG1 CH1(+) | SEQ ID | ASTKGPSVFPLAPSSKSTSGGTAALGCLVKDYFPEPVTVS |
| | NO: 140 | WNSGALTSGVHTFPAVLQSSGLYSLSSVVTVPSSSLGTQT |
| | | YICNVNHKPSNTKVDKKV |
| IgG1 CH1(−) | SEQ ID | ASTKGPSVFPLAPSSKSTSGGTAALGCLVKDYFPEPVTVS |
| | NO: 141 | WNSGALTSGVHTFPAVLQSSGLYSLSSVVTVPSSSLGTQT |
| | | YICNVNHKPSDTKVDKKV |
| IgG2 CH1(+) | SEQ ID | ASTKGPSVFPLAPCSRSTSESTAALGCLVKDYFPEPVTVSW |
| | NO: 142 | NSGALTSGVHTFPAVLQSSGLYSLSSVVTVPSSNFGTQTYT |
| | | CNVDHKPSNTKVDKTV |
| IgG2 CH1(−) | SEQ ID | ASTKGPSVFPLAPCSRSTSESTAALGCLVKDYFPEPVTVSW |
| | NO: 143 | NSGALTSGVHTFPAVLQSSGLYSLSSVVTVPSSNFGTQTYT |
| | | CNVDHKPSDTKVDKTV |
| IgG4 CH1(+) | SEQ ID | ASTKGPSVFPLAPCSRSTSESTAALGCLVKDYFPEPVTVSW |
| | NO: 144 | NSGALTSGVHTFPAVLQSSGLYSLSSVVTVPSSSLGTKTYT |
| | | CNVDHKPSNTKVDKRV |
| IgG4 CH1(−) | SEQ ID | ASTKGPSVFPLAPCSRSTSESTAALGCLVKDYFPEPVTVSW |
| | NO: 145 | NSGALTSGVHTFPAVLQSSGLYSLSSVVTVPSSSLGTKTYT |
| | | CNVDHKPSDTKVDKRV |
| IgG1 hinge | SEQ ID | EPKSCDKTHTCPPCP |
| | NO: 146 | |
| IgG2 hinge | SEQ ID | ERKCCVECPPCP |
| | NO: 147 | |
| IgG4 hinge | SEQ ID | ESKYGPPCPSCP |
| | NO: 148 | |
| Light Chain | SEQ ID | RTVAAPSVFIFPPSDEQLKSGTASVVCLLNNFYPREAKVQ |
| Constant | NO: 149 | WKVDNALQSGNSQESVTEQDSKDSTYSLSSTLTLSKADYE |
| Domain- | | KHKVYACEVTHQGLSSPVTKSFNRGEC |
| Kappa | | |
| Light Chain | SEQ ID | GQPKAAPSVTLFPPSSEELQANKATLVCLISDFYPGAVTVA |
| Constant | NO: 150 | WKADSSPVKAGVETTTPSKQSNNKYAASSYLSLTPEQWK |
| Domain- | | SHRSYSCQVTHEGSTVEKTVAPTECS |
| Lambda | | |
| Anti-CD19- | SEQ ID | EVQLVESGGGLVKPGGSLKLSCAASGYTFTSYVMHWVRQ |
| OG First | NO: 151 | APGKGLEWIGYINPYNDGTKYNEKFQGRVTISSDKSISTAY |
| Subunit | | MELSSLRSEDTAMYYCARGTYYYGTRVFDYWGQGTLVT |
| | | VSS |
| Anti-CD19- | SEQ ID | DIVMTQSPATLSLSPGERATLSCRSSKSLQNVNGNTYLYW |
| OG Second | NO: 152 | FQQKPGQSPQLLIYRMSNLNSGVPDRFSGSGSGTEFTLTISS |
| Subunit | | LEPEDFAVYYCMQHLEYPITFGAGTKLEIK |
| Anti-CD19- | SEQ ID | RMSNLNS |
| OG Second | NO: 153 | |
| Subunit CDR2 | | |
| CD3 High- | SEQ ID | EVQLVESGGGLVQPGGSLRLSCAASGFTFSTYAMNWVRQ |
| [anti- | NO: 154 | APGKGLEWVGRIRSKYNNYATYYADSVKGRFTISRDDSK |
| CD3]_H1.30 | | NTLYLQMNSLRAEDTAVYYCVRHGNFGDSYVSWFAYWG |
| L1.47 scFv | | QGTLVTVSSGKPGSGKPGSGKPGSGKPGSQAVVTQEPSLT |
| | | VSPGGTVTLTCGSSTGAVTTSNYANWVQQKPGKSPRGLIG |
| | | GTNKRAPGVPARFSGSLLGGKAALTISGAQPEDEADYYCA |
| | | LWYSNHWVFGGGTKLTVL |
| Anti-CD3 VHa | SEQ ID | EVQLVESGGGLVQPGGSLRLSCAASGFTFSTYAMNWVRQ |
| | NO: 155 | APGKGLEWVGRIRSKYNNYATYYADSVKGRFTISRDDSK |
| | | NTLYLQMNSLRAEDTAVYYCVRHGNFGDSYVSWFAYWG |
| | | QGTLVTVSS |
| Anti-CD3 scFv | SEQ ID | HGNFGDSYVSWFAY |
| vhCDR3a | NO: 156 | |
| Anti-CD3 VLa | SEQ ID | QAVVTQEPSLTVSPGGTVTLTCGSSTGAVTTSNYANWVQ |
| | NO: 157 | QKPGKSPRGLIGGTNKRAPGVPARFSGSLLGGKAALTISG |
| | | AQPEDEADYYCALWYSNHWVFGGGTKLTVL |
| CD3 High-Int | SEQ ID | EVQLVESGGGLVQPGGSLRLSCAASGFTFSTYAMNWVRQ |
| #1-[anti- | NO: 158 | APGKGLEWVGRIRSKANNYATYYADSVKGRFTISRDDSK |
| CD3]_H1.32 | | NTLYLQMNSLRAEDTAVYYCVRHGNFGDSYVSWFAYWG |
| L1.47 scFv | | QGTLVTVSSGKPGSGKPGSGKPGSGKPGSQAVVTQEPSLT |
| | | VSPGGTVTLTCGSSTGAVTTSNYANWVQQKPGKSPRGLIG |
| | | GTNKRAPGVPARFSGSLLGGKAALTISGAQPEDEADYYCA |
| | | LWYSNHWVFGGGTKLTVL |
| Anti-CD3 VHb | SEQ ID | EVQLVESGGGLVQPGGSLRLSCAASGFTFSTYAMNWVRQ |
| | NO: 159 | APGKGLEWVGRIRSKANNYATYYADSVKGRFTISRDDSK |
| | | NTLYLQMNSLRAEDTAVYYCVRHGNFGDSYVSWFAYWG |
| | | QGTLVTVSS |
| Anti-CD3 scFv | SEQ ID | HGNFGDEYVSWFAY |
| vhCDR3b | NO: 160 | |
| Anti-CD3 scFv | SEQ ID | HGNFGDPYVSWFAY |
| vhCDR3c | NO: 161 | |
| Anti-CD3 scFv | SEQ ID | HGNFGDSYVSWFDY |
| vhCDR3d | NO: 162 | |
| Anti-CD3 scFv | SEQ ID | TYAMS |
| vhCDR1 | NO: 163 | |
| Anti-CD3 scFv | SEQ ID | HENFGGEYVSWFAY |
| vhCDR3e | NO: 164 | |
| CD3 High-Int | SEQ ID | EVQLVESGGGLVQPGGSLRLSCAASGFTFSTYAMNWVRQ |
| #2-[anti- | NO: 165 | APGKGLEWVGRIRSKYNNYATYYADSVKGRFTISRDDSK |
| CD3]_H1.89 | | NTLYLQMNSLRAEDTAVYYCVRHGNFGDEYVSWFAYWG |
| L1.47 scFv | | QGTLVTVSSGKPGSGKPGSGKPGSGKPGSQAVVTQEPSLT |
| | | VSPGGTVTLTCGSSTGAVTTSNYANWVQQKPGKSPRGLIG |
| | | GTNKRAPGVPARFSGSLLGGKAALTISGAQPEDEADYYCA |
| | | LWYSNHWVFGGGTKLTVL |
| Anti-CD3 VHc | SEQ ID | EVQLVESGGGLVQPGGSLRLSCAASGFTFSTYAMNWVRQ |
| | NO: 166 | APGKGLEWVGRIRSKYNNYATYYADSVKGRFTISRDDSK |
| | | NTLYLQMNSLRAEDTAVYYCVRHGNFGDEYVSWFAYWG |
| | | QGTLVTVSS |
| CD3 High-Int | SEQ ID | EVQLVESGGGLVQPGGSLRLSCAASGFTFSTYAMNWVRQ |
| -[anti- | NO: 167 | APGKGLEWVGRIRSKYNNYATYYADSVKGRFTISRDDSK |
| CD3]_H1.90 | | NTLYLQMNSLRAEDTAVYYCVRHGNFGDPYVSWFAYWG |
| L1.47 scFv | | QGTLVTVSSGKPGSGKPGSGKPGSGKPGSQAVVTQEPSLT |
| | | VSPGGTVTLTCGSSTGAVTTSNYANWVQQKPGKSPRGLIG |
| | | GTNKRAPGVPARFSGSLLGGKAALTISGAQPEDEADYYCA |
| | | LWYSNHWVFGGGTKLTVL |
| Anti-CD3 VHd | SEQ ID | EVQLVESGGGLVQPGGSLRLSCAASGFTFSTYAMNWVRQ |
| | NO: 168 | APGKGLEWVGRIRSKYNNYATYYADSVKGRFTISRDDSK |
| | | NTLYLQMNSLRAEDTAVYYCVRHGNFGDPYVSWFAYWG |
| | | QGTLVTVSS |
| Anti-CD3 VHe | SEQ ID | EVQLVESGGGLVQPGGSLRLSCAASGFTFSTYAMNWVRQ |
| | NO: 169 | APGKGLEWVGRIRSKYNNYATYYADSVKGRFTISRDDSK |
| | | NTLYLQMNSLRAEDTAVYYCVRHGNFGDSYVSWFDYWG |
| | | QGTLVTVSS |
| Anti-CD3- | SEQ ID | EVQLVESGGGLVQPGGSLRLSCAASGFTFSTYAMNWVRQ |
| Intermediate- | NO: 170 | APGKGLEWVGRIRSKYNNYATYYADSVKGRFTISRDDSK |
| [anti- | | NTLYLQMNSLRAEDTAVYYCVRHGNFGDSYVSWFDYWG |
| CD3]_H1.33 | | QGTLVTVSSGKPGSGKPGSGKPGSGKPGSQAVVTQEPSLT |
| L1.47 scFv | | VSPGGTVTLTCGSSTGAVTTSNYANWVQQKPGKSPRGLIG |
| | | GTNKRAPGVPARFSGSLLGGKAALTISGAQPEDEADYYCA |
| | | LWYSNHWVFGGGTKLTVL |
| Anti-CD3 VHf | SEQ ID | EVQLVESGGGLVQPGGSLRLSCAASGFTFSTYAMSWVRQ |
| | NO: 171 | APGKGLEWVGRIRSKYNNYATYYADSVKGRFTISRDDSK |
| | | NTLYLQMNSLRAEDTAVYYCVRHGNFGDSYVSWFAYWG |
| | | QGTLVTVSS |
| CD3 Low- | SEQ ID | EVQLVESGGGLVQPGGSLRLSCAASGFTFSTYAMSWVRQ |
| [anti- | NO: 172 | APGKGLEWVGRIRSKYNNYATYYADSVKGRFTISRDDSK |
| CD3]_H1.31 | | NTLYLQMNSLRAEDTAVYYCVRHGNFGDSYVSWFAYWG |
| L1.47 scFv | | QGTLVTVSSGKPGSGKPGSGKPGSGKPGSQAVVTQEPSLT |
| | | VSPGGTVTLTCGSSTGAVTTSNYANWVQQKPGKSPRGLIG |
| | | GTNKRAPGVPARFSGSLLGGKAALTISGAQPEDEADYYCA |
| | | LWYSNHWVFGGGTKLTVL |
| CD3 High[VL- | SEQ ID | QAVVTQEPSLTVSPGGTVTLTCGSSTGAVTTSNYANWVQ |
| VH]-[anti- | NO: 173 | QKPGKSPRGLIGGTNKRAPGVPARFSGSLLGGKAALTISG |
| CD3]_L1.47 | | AQPEDEADYYCALWYSNHWVFGGGTKLTVLGKPGSGKP |
| H1.30 scFv | | GSGKPGSGKPGSEVQLVESGGGLVQPGGSLRLSCAASGFT |
| | | FSTYAMNWVRQAPGKGLEWVGRIRSKYNNYATYYADSV |
| | | KGRFTISRDDSKNTLYLQMNSLRAEDTAVYYCVRHGNFG |
| | | DSYVSWFAYWGQGTLVTVSS |
| CD3 High-Int | SEQ ID | QAVVTQEPSLTVSPGGTVTLTCGSSTGAVTTSNYANWVQ |
| #1[VL-VH]- | NO: 174 | QKPGKSPRGLIGGTNKRAPGVPARFSGSLLGGKAALTISG |
| [anti- | | AQPEDEADYYCALWYSNHWVFGGGTKLTVLGKPGSGKP |
| CD3]_L1.47 | | GSGKPGSGKPGSEVQLVESGGGLVQPGGSLRLSCAASGFT |
| H1.32 scFv | | FSTYAMNWVRQAPGKGLEWVGRIRSKANNYATYYADSV |
| | | KGRFTISRDDSKNTLYLQMNSLRAEDTAVYYCVRHGNFG |
| | | DSYVSWFAYWGQGTLVTVSS |
| CD3 High-Int | SEQ ID | QAVVTQEPSLTVSPGGTVTLTCGSSTGAVTTSNYANWVQ |
| #2[VL-VH]- | NO: 175 | QKPGKSPRGLIGGTNKRAPGVPARFSGSLLGGKAALTISG |
| [anti- | | AQPEDEADYYCALWYSNHWVFGGGTKLTVLGKPGSGKP |
| CD3]_L1.47 | | GSGKPGSGKPGSEVQLVESGGGLVQPGGSLRLSCAASGFT |
| H1.89 scFv | | FSTYAMNWVRQAPGKGLEWVGRIRSKYNNYATYYADSV |
| | | KGRFTISRDDSKNTLYLQMNSLRAEDTAVYYCVRHGNFG |
| | | DEYVSWFAYWGQGTLVTVSS |
| CD3 High- | SEQ ID | QAVVTQEPSLTVSPGGTVTLTCGSSTGAVTTSNYANWVQ |
| Int[VL-VH]- | NO: 176 | QKPGKSPRGLIGGTNKRAPGVPARFSGSLLGGKAALTISG |
| [anti- | | AQPEDEADYYCALWYSNHWVFGGGTKLTVLGKPGSGKP |
| CD3]_L1.47 | | GSGKPGSGKPGSEVQLVESGGGLVQPGGSLRLSCAASGFT |
| H1.90 scFv | | FSTYAMNWVRQAPGKGLEWVGRIRSKYNNYATYYADSV |
| | | KGRFTISRDDSKNTLYLQMNSLRAEDTAVYYCVRHGNFG |
| | | DPYVSWFAYWGQGTLVTVSS |
| Anti-CD3- | SEQ ID | QAVVTQEPSLTVSPGGTVTLTCGSSTGAVTTSNYANWVQ |
| Intermediate | NO: 177 | QKPGKSPRGLIGGTNKRAPGVPARFSGSLLGGKAALTISG |
| [VL-VH]-[anti- | | AQPEDEADYYCALWYSNHWVFGGGTKLTVLGKPGSGKP |
| CD3]_L1.47 | | GSGKPGSGKPGSEVQLVESGGGLVQPGGSLRLSCAASGFT |
| H1.33 scFv | | FSTYAMNWVRQAPGKGLEWVGRIRSKYNNYATYYADSV |
| | | KGRFTISRDDSKNTLYLQMNSLRAEDTAVYYCVRHGNFG |
| | | DSYVSWFDYWGQGTLVTVSS |
| CD3 High- | SEQ ID | QAVVTQEPSLTVSPGGTVTLTCGSSTGAVTTSNYANWVQ |
| Int[VL-VH]- | NO: 178 | QKPGKSPRGLIGGTNKRAPGVPARFSGSLLGGKAALTISG |
| [anti- | | AQPEDEADYYCALWYSNHWVFGGGTKLTVLGKPGSGKP |
| CD3]_L1.47 | | GSGKPGSGKPGSEVQLVESGGGLVQPGGSLRLSCAASGFT |
| H1.31 scFv | | FSTYAMSWVRQAPGKGLEWVGRIRSKYNNYATYYADSV |
| | | KGRFTISRDDSKNTLYLQMNSLRAEDTAVYYCVRHGNFG |
| | | DSYVSWFAYWGQGTLVTVSS |
| Anti-CD3 VHg | SEQ ID | EVQLVESGGGLVQPGGSLRLSCAASGFTFSTYAMNWVRQ |
| | NO: 179 | APGKCLEWVGRIRSKYNNYATYYADSVKGRFTISRDDSK |
| | | NTLYLQMNSLRAEDTAVYYCVRHTNFGDSYVSWFAYWG |
| | | QGTLVTVSS |
| Anti-CD3 VLb | SEQ ID | QAVVTQEPSLTVSPGGTVTLTCGSSTGAVTTSNYANWVQ |
| | NO: 180 | QKPGKSPRGLIGGTNKRAPGVPARFSGSLLGGKAALTISG |
| | | AQPEDEADYYCALWYSNHWVFGCGTKLTVL |
| Anti-CD3 VHh | SEQ ID | EVQLVESGGGLVQPGGSLRLSCAASGFTFSTYAMNWVRQ |
| | NO: 181 | APGKCLEWVGRIRSKYNNYATYYADSVKGRFTISRDDSK |
| | | NTLYLQMNSLRAEDTAVYYCVRHTNFGGSYVSWFAYWG |
| | | QGTLVTVSS |
| Anti-CD3 VHi | SEQ ID | EVQLVESGGGLVQPGGSLRLSCAASGFTFSTYAMNWVRQ |
| | NO: 182 | APGKCLEWVGRIRSKANNYATYYADSVKGRFTISRDDSK |
| | | NTLYLQMNSLRAEDTAVYYCVRHTNFGDSYVSWFAYWG |
| | | QGTLVTVSS |
| Anti-CD3 VHj | SEQ ID | EVQLVESGGGLVQPGGSLRLSCAASGFTFSTYAMNWVRQ |
| | NO: 183 | APGKCLEWVGRIRSKANNYATYYADSVKGRFTISRDDSK |
| | | NTLYLQMNSLRAEDTAVYYCVRHTNFGGSYVSWFAYWG |
| | | QGTLVTVSS |
| Anti-CD3 VHk | SEQ ID | EVQLVESGGGLVQPGGSLRLSCAASGFTFSTYAMNWVRQ |
| | NO: 184 | APGKCLEWVGRIRSKYNNYATYYADSVKGRFTISRDDSK |
| | | NTLYLQMNSLRAEDTAVYYCVRHENFGGSYVSWFAYWG |
| | | QGTLVTVSS |
| Anti-CD3 VHl | SEQ ID | EVQLVESGGGLVQPGGSLRLSCAASGFTFSTYAMNWVRQ |
| | NO: 185 | APGKCLEWVGRIRSKYNNYATYYADSVKGRFTISRDDSK |
| | | NTLYLQMNSLRAEDTAVYYCVRHENFGDSYVSWFAYWG |
| | | QGTLVTVSS |
| Anti-CD3 | SEQ ID | EVQLVESGGGLVQPGGSLRLSCAASGFTFSTYAMNWVRQ |
| VHm | NO: 186 | APGKCLEWVGRIRSKANNYATYYADSVKGRFTISRDDSK |
| | | NTLYLQMNSLRAEDTAVYYCVRHENFGDSYVSWFAYWG |
| | | QGTLVTVSS |
| Anti-CD3 VHn | SEQ ID | EVQLVESGGGLVQPGGSLRLSCAASGFTFSTYAMNWVRQ |
| | NO: 187 | APGKCLEWVGRIRSKANNYATYYADSVKGRFTISRDDSK |
| | | NTLYLQMNSLRAEDTAVYYCVRHENFGGSYVSWFAYWG |
| | | QGTLVTVSS |
| Anti-CD3 VHo | SEQ ID | EVQLVESGGGLVQPGGSLRLSCAASGFTFSTYAMNWVRQ |
| | NO: 188 | APGKCLEWVGRIRSKYNNYATYYADSVKGRFTISRDDSK |
| | | NTLYLQMNSLRAEDTAVYYCVRHTNFGGEYVSWFAYWG |
| | | QGTLVTVSS |
| Anti-CD3 VHp | SEQ ID | EVQLVESGGGLVQPGGSLRLSCAASGFTFSTYAMNWVRQ |
| | NO: 189 | APGKCLEWVGRIRSKYNNYATYYADSVKGRFTISRDDSK |
| | | NTLYLQMNSLRAEDTAVYYCVRHENFGGEYVSWFAYWG |
| | | QGTLVTVSS |
| Anti-CD3- | SEQ ID | EVQLVESGGGLVQPGGSLRLSCAASGFTFSTYAMNWVRQ |
| H1.214_L1.47 | NO: 190 | APGKCLEWVGRIRSKYNNYATYYADSVKGRFTISRDDSK |
| _VH_G44C_V | | NTLYLQMNSLRAEDTAVYYCVRHTNFGDSYVSWFAYWG |
| L_G100C_scF | | QGTLVTVSSGKPGSGKPGSGKPGSGKPGSQAVVTQEPSLT |
| V | | VSPGGTVTLTCGSSTGAVTTSNYANWVQQKPGKSPRGLIG |
| | | GTNKRAPGVPARFSGSLLGGKAALTISGAQPEDEADYYCA |
| | | LWYSNHWVFGCGTKLTVL |
| Anti-CD3- | SEQ ID | EVQLVESGGGLVQPGGSLRLSCAASGFTFSTYAMNWVRQ |
| H1.270_L1.47 | NO: 191 | APGKCLEWVGRIRSKYNNYATYYADSVKGRFTISRDDSK |
| _VH_G44C_V | | NTLYLQMNSLRAEDTAVYYCVRHTNFGGSYVSWFAYWG |
| L_G100C_scF | | QGTLVTVSSGKPGSGKPGSGKPGSGKPGSQAVVTQEPSLT |
| V | | VSPGGTVTLTCGSSTGAVTTSNYANWVQQKPGKSPRGLIG |
| | | GTNKRAPGVPARFSGSLLGGKAALTISGAQPEDEADYYCA |
| | | LWYSNHWVFGCGTKLTVL |
| Anti-CD3- | SEQ ID | EVQLVESGGGLVQPGGSLRLSCAASGFTFSTYAMNWVRQ |
| H1.271_L1.47 | NO: 192 | APGKCLEWVGRIRSKANNYATYYADSVKGRFTISRDDSK |
| _VH_G44C_V | | NTLYLQMNSLRAEDTAVYYCVRHTNFGDSYVSWFAYWG |
| L_G100C_scF | | QGTLVTVSSGKPGSGKPGSGKPGSGKPGSQAVVTQEPSLT |
| V | | VSPGGTVTLTCGSSTGAVTTSNYANWVQQKPGKSPRGLIG |
| | | GTNKRAPGVPARFSGSLLGGKAALTISGAQPEDEADYYCA |
| | | LWYSNHWVFGCGTKLTVL |
| Anti-CD3- | SEQ ID | EVQLVESGGGLVQPGGSLRLSCAASGFTFSTYAMNWVRQ |
| H1.272_L1.47 | NO: 193 | APGKCLEWVGRIRSKANNYATYYADSVKGRFTISRDDSK |
| _VH_G44C_V | | NTLYLQMNSLRAEDTAVYYCVRHTNFGGSYVSWFAYWG |
| L_G100C_scF | | QGTLVTVSSGKPGSGKPGSGKPGSGKPGSQAVVTQEPSLT |
| V | | VSPGGTVTLTCGSSTGAVTTSNYANWVQQKPGKSPRGLIG |
| | | GTNKRAPGVPARFSGSLLGGKAALTISGAQPEDEADYYCA |
| | | LWYSNHWVFGCGTKLTVL |
| Anti-CD3- | SEQ ID | EVQLVESGGGLVQPGGSLRLSCAASGFTFSTYAMNWVRQ |
| H1.273_L1.47 | NO: 194 | APGKCLEWVGRIRSKYNNYATYYADSVKGRFTISRDDSK |
| _VH_G44C_V | | NTLYLQMNSLRAEDTAVYYCVRHENFGDSYVSWFAYWG |
| L_G100C_scF | | QGTLVTVSSGKPGSGKPGSGKPGSGKPGSQAVVTQEPSLT |
| V | | VSPGGTVTLTCGSSTGAVTTSNYANWVQQKPGKSPRGLIG |
| | | GTNKRAPGVPARFSGSLLGGKAALTISGAQPEDEADYYCA |
| | | LWYSNHWVFGCGTKLTVL |
| Anti-CD3- | SEQ ID | EVQLVESGGGLVQPGGSLRLSCAASGFTFSTYAMNWVRQ |
| H1.274_L1.47 | NO: 195 | APGKCLEWVGRIRSKYNNYATYYADSVKGRFTISRDDSK |
| _VH_G44C_V | | NTLYLQMNSLRAEDTAVYYCVRHENFGGSYVSWFAYWG |
| L_G100C_scF | | QGTLVTVSSGKPGSGKPGSGKPGSGKPGSQAVVTQEPSLT |
| V | | VSPGGTVTLTCGSSTGAVTTSNYANWVQQKPGKSPRGLIG |
| | | GTNKRAPGVPARFSGSLLGGKAALTISGAQPEDEADYYCA |
| | | LWYSNHWVFGCGTKLTVL |
| Anti-CD3- | SEQ ID | EVQLVESGGGLVQPGGSLRLSCAASGFTFSTYAMNWVRQ |
| H1.275_L1.47 | NO: 196 | APGKCLEWVGRIRSKANNYATYYADSVKGRFTISRDDSK |
| _VH_G44C_V | | NTLYLQMNSLRAEDTAVYYCVRHENFGDSYVSWFAYWG |
| L_G100C_scF | | QGTLVTVSSGKPGSGKPGSGKPGSGKPGSQAVVTQEPSLT |
| V | | VSPGGTVTLTCGSSTGAVTTSNYANWVQQKPGKSPRGLIG |
| | | GTNKRAPGVPARFSGSLLGGKAALTISGAQPEDEADYYCA |
| | | LWYSNHWVFGCGTKLTVL |
| Anti-CD3- | SEQ ID | EVQLVESGGGLVQPGGSLRLSCAASGFTFSTYAMNWVRQ |
| H1.276_L1.47 | NO: 197 | APGKCLEWVGRIRSKANNYATYYADSVKGRFTISRDDSK |
| _VH_G44C_V | | NTLYLQMNSLRAEDTAVYYCVRHENFGGSYVSWFAYWG |
| L_G100C_scF | | QGTLVTVSSGKPGSGKPGSGKPGSGKPGSQAVVTQEPSLT |
| V | | VSPGGTVTLTCGSSTGAVTTSNYANWVQQKPGKSPRGLIG |
| | | GTNKRAPGVPARFSGSLLGGKAALTISGAQPEDEADYYCA |
| | | LWYSNHWVFGCGTKLTVL |
| Anti-CD3- | SEQ ID | EVQLVESGGGLVQPGGSLRLSCAASGFTFSTYAMNWVRQ |
| H1.279_L1.47 | NO: 198 | APGKCLEWVGRIRSKYNNYATYYADSVKGRFTISRDDSK |
| _VH_G44C_V | | NTLYLQMNSLRAEDTAVYYCVRHTNFGGEYVSWFAYWG |
| L_G100C_scF | | QGTLVTVSSGKPGSGKPGSGKPGSGKPGSQAVVTQEPSLT |
| V | | VSPGGTVTLTCGSSTGAVTTSNYANWVQQKPGKSPRGLIG |
| | | GTNKRAPGVPARFSGSLLGGKAALTISGAQPEDEADYYCA |
| | | LWYSNHWVFGCGTKLTVL |
| Anti-CD3- | SEQ ID | EVQLVESGGGLVQPGGSLRLSCAASGFTFSTYAMNWVRQ |
| H1.280_L1.47 | NO: 199 | APGKCLEWVGRIRSKYNNYATYYADSVKGRFTISRDDSK |
| _VH_G44C_V | | NTLYLQMNSLRAEDTAVYYCVRHENFGGEYVSWFAYWG |
| L_G100C_scF | | QGTLVTVSSGKPGSGKPGSGKPGSGKPGSQAVVTQEPSLT |
| V | | VSPGGTVTLTCGSSTGAVTTSNYANWVQQKPGKSPRGLIG |
| | | GTNKRAPGVPARFSGSLLGGKAALTISGAQPEDEADYYCA |
| | | LWYSNHWVFGCGTKLTVL |
| Anti-CD3- | SEQ ID | QAVVTQEPSLTVSPGGTVTLTCGSSTGAVTTSNYANWVQ |
| L1.47_H1.214 | NO: 200 | QKPGKSPRGLIGGTNKRAPGVPARFSGSLLGGKAALTISG |
| _VH_G44C_V | | AQPEDEADYYCALWYSNHWVFGCGTKLTVLGKPGSGKP |
| L_G100C_scF | | GSGKPGSGKPGSEVQLVESGGGLVQPGGSLRLSCAASGFT |
| V | | FSTYAMNWVRQAPGKCLEWVGRIRSKYNNYATYYADSV |
| | | KGRFTISRDDSKNTLYLQMNSLRAEDTAVYYCVRHTNFG |
| | | DSYVSWFAYWGQGTLVTVSS |
| Anti-CD3- | SEQ ID | QAVVTQEPSLTVSPGGTVTLTCGSSTGAVTTSNYANWVQ |
| L1.47_H1.270 | NO: 201 | QKPGKSPRGLIGGTNKRAPGVPARFSGSLLGGKAALTISG |
| _VH_G44C_V | | AQPEDEADYYCALWYSNHWVFGCGTKLTVLGKPGSGKP |
| L_G100C_scF | | GSGKPGSGKPGSEVQLVESGGGLVQPGGSLRLSCAASGFT |
| V | | FSTYAMNWVRQAPGKCLEWVGRIRSKYNNYATYYADSV |
| | | KGRFTISRDDSKNTLYLQMNSLRAEDTAVYYCVRHTNFG |
| | | GSYVSWFAYWGQGTLVTVSS |
| Anti-CD3- | SEQ ID | QAVVTQEPSLTVSPGGTVTLTCGSSTGAVTTSNYANWVQ |
| L1.47_H1.271 | NO: 202 | QKPGKSPRGLIGGTNKRAPGVPARFSGSLLGGKAALTISG |
| _VH_G44C_V | | AQPEDEADYYCALWYSNHWVFGCGTKLTVLGKPGSGKP |
| L_G100C_scF | | GSGKPGSGKPGSEVQLVESGGGLVQPGGSLRLSCAASGFT |
| V | | FSTYAMNWVRQAPGKCLEWVGRIRSKANNYATYYADSV |
| | | KGRFTISRDDSKNTLYLQMNSLRAEDTAVYYCVRHTNFG |
| | | DSYVSWFAYWGQGTLVTVSS |
| Anti-CD3- | SEQ ID | QAVVTQEPSLTVSPGGTVTLTCGSSTGAVTTSNYANWVQ |
| L1.47_H1.272 | NO: 203 | QKPGKSPRGLIGGTNKRAPGVPARFSGSLLGGKAALTISG |
| _VH_G44C_V | | AQPEDEADYYCALWYSNHWVFGCGTKLTVLGKPGSGKP |
| L_G100C_scF | | GSGKPGSGKPGSEVQLVESGGGLVQPGGSLRLSCAASGFT |
| V | | FSTYAMNWVRQAPGKCLEWVGRIRSKANNYATYYADSV |
| | | KGRFTISRDDSKNTLYLQMNSLRAEDTAVYYCVRHTNFG |
| | | GSYVSWFAYWGQGTLVTVSS |
| Anti-CD3- | SEQ ID | QAVVTQEPSLTVSPGGTVTLTCGSSTGAVTTSNYANWVQ |
| L1.47_H1.273 | NO: 204 | QKPGKSPRGLIGGTNKRAPGVPARFSGSLLGGKAALTISG |
| _VH_G44C_V | | AQPEDEADYYCALWYSNHWVFGCGTKLTVLGKPGSGKP |
| L_G100C_scF | | GSGKPGSGKPGSEVQLVESGGGLVQPGGSLRLSCAASGFT |
| V | | FSTYAMNWVRQAPGKCLEWVGRIRSKYNNYATYYADSV |
| | | KGRFTISRDDSKNTLYLQMNSLRAEDTAVYYCVRHENFG |
| | | DSYVSWFAYWGQGTLVTVSS |
| Anti-CD3- | SEQ ID | QAVVTQEPSLTVSPGGTVTLTCGSSTGAVTTSNYANWVQ |
| L1.47_H1.274 | NO: 205 | QKPGKSPRGLIGGTNKRAPGVPARFSGSLLGGKAALTISG |
| _VH_G44C_V | | AQPEDEADYYCALWYSNHWVFGCGTKLTVLGKPGSGKP |
| L_G100C_scF | | GSGKPGSGKPGSEVQLVESGGGLVQPGGSLRLSCAASGFT |
| V | | FSTYAMNWVRQAPGKCLEWVGRIRSKYNNYATYYADSV |
| | | KGRFTISRDDSKNTLYLQMNSLRAEDTAVYYCVRHENFG |
| | | GSYVSWFAYWGQGTLVTVSS |
| Anti-CD3- | SEQ ID | QAVVTQEPSLTVSPGGTVTLTCGSSTGAVTTSNYANWVQ |
| L1.47_H1.275 | NO: 206 | QKPGKSPRGLIGGTNKRAPGVPARFSGSLLGGKAALTISG |
| _VH_G44C_V | | AQPEDEADYYCALWYSNHWVFGCGTKLTVLGKPGSGKP |
| L_G100C_scF | | GSGKPGSGKPGSEVQLVESGGGLVQPGGSLRLSCAASGFT |
| V | | FSTYAMNWVRQAPGKCLEWVGRIRSKANNYATYYADSV |
| | | KGRFTISRDDSKNTLYLQMNSLRAEDTAVYYCVRHENFG |
| | | DSYVSWFAYWGQGTLVTVSS |
| Anti-CD3- | SEQ ID | QAVVTQEPSLTVSPGGTVTLTCGSSTGAVTTSNYANWVQ |
| L1.47_H1.276 | NO: 207 | QKPGKSPRGLIGGTNKRAPGVPARFSGSLLGGKAALTISG |
| _VH_G44C_V | | AQPEDEADYYCALWYSNHWVFGCGTKLTVLGKPGSGKP |
| L_G100C_scF | | GSGKPGSGKPGSEVQLVESGGGLVQPGGSLRLSCAASGFT |
| V | | FSTYAMNWVRQAPGKCLEWVGRIRSKANNYATYYADSV |
| | | KGRFTISRDDSKNTLYLQMNSLRAEDTAVYYCVRHENFG |
| | | GSYVSWFAYWGQGTLVTVSS |
| Anti-CD3- | SEQ ID | QAVVTQEPSLTVSPGGTVTLTCGSSTGAVTTSNYANWVQ |
| L1.47_H1.279 | NO: 208 | QKPGKSPRGLIGGTNKRAPGVPARFSGSLLGGKAALTISG |
| _VH_G44C_V | | AQPEDEADYYCALWYSNHWVFGCGTKLTVLGKPGSGKP |
| L_G100C_scF | | GSGKPGSGKPGSEVQLVESGGGLVQPGGSLRLSCAASGFT |
| c | | FSTYAMNWVRQAPGKCLEWVGRIRSKYNNYATYYADSV |
| | | KGRFTISRDDSKNTLYLQMNSLRAEDTAVYYCVRHTNFG |
| | | GEYVSWFAYWGQGTLVTVSS |
| Anti-CD3- | SEQ ID | QAVVTQEPSLTVSPGGTVTLTCGSSTGAVTTSNYANWVQ |
| L1.47_H1.280 | NO: 209 | QKPGKSPRGLIGGTNKRAPGVPARFSGSLLGGKAALTISG |
| _VH_G44C_V | | AQPEDEADYYCALWYSNHWVFGCGTKLTVLGKPGSGKP |
| L_G100C_ | | GSGKPGSGKPGSEVQLVESGGGLVQPGGSLRLSCAASGFT |
| scFc | | FSTYAMNWVRQAPGKCLEWVGRIRSKYNNYATYYADSV |
| | | KGRFTISRDDSKNTLYLQMNSLRAEDTAVYYCVRHENFG |
| | | GEYVSWFAYWGQGTLVTVSS |
| Chain 1- | SEQ ID | QVQLVQSGAEVKKPGASVKVSCKASGYTFTSYVMHWVR |
| CD19- | NO: 210 | QAPGQGLEWMGYINPYNDGTKYNEKFQGRVTITSDKSTS |
| NEW_VH_Ig | | TAYMELSSLRSEDTAVYYCARGTYYYGTRVFDYWGQGT |
| G1_pI(−)_ | | LVTVSSASTKGPSVFPLAPSSKSTSGGTAALGCLVKDYFPE |
| Isosteric_A_ | | PVTVSWNSGALTSGVHTFPAVLQSSGLYSLSSVVTVPSSSL |
| PVA/S267K/ | | GTQTYICNVNHKPSDTKVDKKVEPKSCDKTHTCPPCPAPP |
| L368D/K370S/ | | VAGPSVFLFPPKPKDTLMISRTPEVTCVVVDVKHEDPEVK |
| M428L/N434S | | FNWYVDGVEVHNAKTKPREEEYNSTYRVVSVLTVLHQD |
| | | WLNGKEYKCKVSNKALPAPIEKTISKAKGQPREPQVYTLP |
| | | PSREEMTKNQVSLTCDVSGFYPSDIAVEWESDGQPENNYK |
| | | TTPPVLDSDGSFFLYSKLTVDKSRWEQGDVFSCSVLHEAL |
| | | HSHYTQKSLSLSPGK |
| Chain 2- | SEQ ID | EVQLVESGGGLVQPGGSLRLSCAASGFTFSTYAMNWVRQ |
| [CD3]_H1.30_ | NO: 211 | APGKGLEWVGRIRSKYNNYATYYADSVKGRFTISRDDSK |
| L1.47_scFv(G | | NTLYLQMNSLRAEDTAVYYCVRHGNFGDSYVSWFAYWG |
| KPGS)4_Fc(2 | | QGTLVTVSSGKPGSGKPGSGKPGSGKPGSQAVVTQEPSLT |
| 16)_IgG1_C22 | | VSPGGTVTLTCGSSTGAVTTSNYANWVQQKPGKSPRGLIG |
| OS/PVA/S267 | | GTNKRAPGVPARFSGSLLGGKAALTISGAQPEDEADYYCA |
| K/S364K/E357 | | LWYSNHWVFGGGTKLTVLEPKSSDKTHTCPPCPAPPVAG |
| Q/M428L/N43 | | PSVFLFPPKPKDTLMISRTPEVTCVVVDVKHEDPEVKFNW |
| 4S | | YVDGVEVHNAKTKPREEQYNSTYRVVSVLTVLHQDWLN |
| | | GKEYKCKVSNKALPAPIEKTISKAKGQPREPQVYTLPPSRE |
| | | QMTKNQVKLTCLVKGFYPSDIAVEWESNGQPENNYKTTP |
| | | PVLDSDGSFFLYSKLTVDKSRWQQGNVFSCSVLHEALHSH |
| | | YTQKSLSLSPGK |
| Chain 3- | SEQ ID | DIVMTQSPLSLPVTPGEPASISCRSSKSLQNVNGNTYLYWF |
| 4G7 L4.201 | NO: 212 | LQKPGQSPQLLIYRASNLNSGVPDRFSGSGSGTDFTLKISR |
| Light Chain | | VEAEDVGVYYCMQHLEYPITFGQGTKLEIKRTVAAPSVFI |
| | | FPPSDEQLKSGTASVVCLLNNFYPREAKVQWKVDNALQS |
| | | GNSQESVTEQDSKDSTYSLSSTLTLSKADYEKHKVYACEV |
| | | THQGLSSPVTKSFNRGEC |
| Chain 1- | SEQ ID | EVQLVESGGGLVKPGGSLKLSCAASGYTFTSYVMHWVRQ |
| CD19- | NO: 213 | APGKGLEWIGYINPYNDGTKYNEKFQGRVTISSDKSISTAY |
| OG_VHa_IgG | | MELSSLRSEDTAMYYCARGTYYYGTRVFDYWGQGTLVT |
| 1 | | VSSASTKGPSVFPLAPSSKSTSGGTAALGCLVKDYFPEPVT |
| | | VSWNSGALTSGVHTFPAVLQSSGLYSLSSVVTVPSSSLGT |
| | | QTYICNVNHKPSDTKVDKKVEPKSCDKTHTCPPCPAPPVA |
| | | GPSVFLFPPKPKDTLMISRTPEVTCVVVDVKHEDPEVKFN |
| | | WYVDGVEVHNAKTKPREEEYNSTYRVVSVLTVLHQDWL |
| | | NGKEYKCKVSNKALPAPIEKTISKAKGQPREPQVYTLPPSR |
| | | EEMTKNQVSLTCDVSGFYPSDIAVEWESDGQPENNYKTTP |
| | | PVLDSDGSFFLYSKLTVDKSRWEQGDVFSCSVMHEALHN |
| | | HYTQKSLSLSPGK |
| Chain 2- | SEQ ID | EVQLVESGGGLVQPGGSLRLSCAASGFTFSTYAMNWVRQ |
| [CD3]_H1.89 | NO: 214 | APGKGLEWVGRIRSKYNNYATYYADSVKGRFTISRDDSK |
| L1.47_scFv(G | | NTLYLQMNSLRAEDTAVYYCVRHGNFGDEYVSWFAYWG |
| KPGS)4_Fc(2 | | QGTLVTVSSGKPGSGKPGSGKPGSGKPGSQAVVTQEPSLT |
| 16)_IgG1 | | VSPGGTVTLTCGSSTGAVTTSNYANWVQQKPGKSPRGLIG |
| | | GTNKRAPGVPARFSGSLLGGKAALTISGAQPEDEADYYCA |
| | | LWYSNHWVFGGGTKLTVLEPKSSDKTHTCPPCPAPPVAG |
| | | PSVFLFPPKPKDTLMISRTPEVTCVVVDVKHEDPEVKFNW |
| | | YVDGVEVHNAKTKPREEQYNSTYRVVSVLTVLHQDWLN |
| | | GKEYKCKVSNKALPAPIEKTISKAKGQPREPQVYTLPPSRE |
| | | QMTKNQVKLTCLVKGFYPSDIAVEWESNGQPENNYKTTP |
| | | PVLDSDGSFFLYSKLTVDKSRWQQGNVFSCSVMHEALHN |
| | | HYTQKSLSLSPGK |
| Chain 3- | SEQ ID | DIVMTQSPATLSLSPGERATLSCRSSKSLQNVNGNTYLYW |
| 4G7 L1.155 | NO: 215 | FQQKPGQSPQLLIYRMSNLNSGVPDRFSGSGSGTEFTLTISS |
| Light Chain | | LEPEDFAVYYCMQHLEYPITFGAGTKLEIKRTVAAPSVFIF |
| | | PPSDEQLKSGTASVVCLLNNFYPREAKVQWKVDNALQSG |
| | | NSQESVTEQDSKDSTYSLSSTLTLSKADYEKHKVYACEVT |
| | | HQGLSSPVTKSFNRGEC |
| Chain 2- | SEQ ID | EVQLVESGGGLVQPGGSLRLSCAASGFTFSTYAMNWVRQ |
| [CD3]_H1.33 | NO: 216 | APGKGLEWVGRIRSKYNNYATYYADSVKGRFTISRDDSK |
| L1.47_scFv(G | | NTLYLQMNSLRAEDTAVYYCVRHGNFGDSYVSWFDYWG |
| KPGS)4_Fc(2 | | QGTLVTVSSGKPGSGKPGSGKPGSGKPGSQAVVTQEPSLT |
| 16)_IgG1 | | VSPGGTVTLTCGSSTGAVTTSNYANWVQQKPGKSPRGLIG |
| | | GTNKRAPGVPARFSGSLLGGKAALTISGAQPEDEADYYCA |
| | | LWYSNHWVFGGGTKLTVLEPKSSDKTHTCPPCPAPPVAG |
| | | PSVFLFPPKPKDTLMISRTPEVTCVVVDVKHEDPEVKFNW |
| | | YVDGVEVHNAKTKPREEQYNSTYRVVSVLTVLHQDWLN |
| | | GKEYKCKVSNKALPAPIEKTISKAKGQPREPQVYTLPPSRE |
| | | QMTKNQVKLTCLVKGFYPSDIAVEWESNGQPENNYKTTP |
| | | PVLDSDGSFFLYSKLTVDKSRWQQGNVFSCSVMHEALHN |
| | | HYTQKSLSLSPGK |
| Chain_2- | SEQ ID | EVQLVESGGGLVQPGGSLRLSCAASGFTFSTYAMNWVRQ |
| [CD3]_H1.32 | NO: 217 | APGKGLEWVGRIRSKANNYATYYADSVKGRFTISRDDSK |
| L1.47_scFv(G | | NTLYLQMNSLRAEDTAVYYCVRHGNFGDSYVSWFAYWG |
| KPGS)4_Fc(2 | | QGTLVTVSSGKPGSGKPGSGKPGSGKPGSQAVVTQEPSLT |
| 16)_IgG1 | | VSPGGTVTLTCGSSTGAVTTSNYANWVQQKPGKSPRGLIG |
| | | GTNKRAPGVPARFSGSLLGGKAALTISGAQPEDEADYYCA |
| | | LWYSNHWVFGGGTKLTVLEPKSSDKTHTCPPCPAPPVAG |
| | | PSVFLEPPKPKDTLMISRTPEVTCVVVDVKHEDPEVKFNW |
| | | YVDGVEVHNAKTKPREEQYNSTYRVVSVLTVLHQDWLN |
| | | GKEYKCKVSNKALPAPIEKTISKAKGQPREPQVYTLPPSRE |
| | | QMTKNQVKLTCLVKGFYPSDIAVEWESNGQPENNYKTTP |
| | | PVLDSDGSFFLYSKLTVDKSRWQQGNVFSCSVMHEALHN |
| | | HYTQKSLSLSPGK |
| Chain_2- | SEQ ID | EVQLVESGGGLVQPGGSLRLSCAASGFTFSTYAMNWVRQ |
| [CD3]_H1.30 | NO: 218 | APGKGLEWVGRIRSKYNNYATYYADSVKGRFTISRDDSK |
| L1.47_scFv(G | | NTLYLQMNSLRAEDTAVYYCVRHGNFGDSYVSWFAYWG |
| KPGS)4_Fc(2 | | QGTLVTVSSGKPGSGKPGSGKPGSGKPGSQAVVTQEPSLT |
| 16)_IgG1 | | VSPGGTVTLTCGSSTGAVTTSNYANWVQQKPGKSPRGLIG |
| | | GTNKRAPGVPARFSGSLLGGKAALTISGAQPEDEADYYCA |
| | | LWYSNHWVFGGGTKLTVLEPKSSDKTHTCPPCPAPPVAG |
| | | PSVFLFPPKPKDTLMISRTPEVTCVVVDVKHEDPEVKFNW |
| | | YVDGVEVHNAKTKPREEQYNSTYRVVSVLTVLHQDWLN |
| | | GKEYKCKVSNKALPAPIEKTISKAKGQPREPQVYTLPPSRE |
| | | QMTKNQVKLTCLVKGFYPSDIAVEWESNGQPENNYKTTP |
| | | PVLDSDGSFFLYSKLTVDKSRWQQGNVFSCSVMHEALHN |
| | | HYTQKSLSLSPGK |
| Chain_2- | SEQ ID | QVQLVQSGAEVKKPGASVKVSCKASGYTFTSYVMHWVR |
| CD19- | NO: 219 | QAPGQGLEWMGYINPYNDGTKYNEKFQGRVTITSDKSTS |
| NEW_VH_(G | | TAYMELSSLRSEDTAVYYCARGTYYYGTRVFDYWGQGT |
| 4S)2_[CD3]_L | | LVTVSSASTKGPSVFPLAPSSKSTSGGTAALGCLVKDYFPE |
| 1.47_H1.280 | | PVTVSWNSGALTSGVHTFPAVLQSSGLYSLSSVVTVPSSSL |
| VH_G44C_VL | | GTQTYICNVNHKPSNTKVDKKVEPKSCGGGGSGGGGSQA |
| G100C_scFv( | | VVTQEPSLTVSPGGTVTLTCGSSTGAVTTSNYANWVQQK |
| GKPGS)4_(G4 | | PGKSPRGLIGGTNKRAPGVPARFSGSLLGGKAALTISGAQP |
| S)2_Fc(222)_ | | EDEADYYCALWYSNHWVFGCGTKLTVLGKPGSGKPGSG |
| IgG1 | | KPGSGKPGSEVQLVESGGGLVQPGGSLRLSCAASGFTFST |
| | | YAMNWVRQAPGKCLEWVGRIRSKYNNYATYYADSVKG |
| | | RFTISRDDSKNTLYLQMNSLRAEDTAVYYCVRHENFGGE |
| | | YVSWFAYWGQGTLVTVSSGGGGSGGGGSKTHTCPPCPAP |
| | | PVAGPSVFLFPPKPKDTLMISRTPEVTCVVVDVKHEDPEV |
| | | KFNWYVDGVEVHNAKTKPREEQYNSTYRVVSVLTVLHQ |
| | | DWLNGKEYKCKVSNKALPAPIEKTISKAKGQPREPQVYTL |
| | | PPSREQMTKNQVKLTCLVKGFYPSDIAVEWESNGQPENN |
| | | YKTTPPVLDSDGSFFLYSKLTVDKSRWQQGNVFSCSVLHE |
| | | ALHSHYTQKSLSLSPGK |
| Chain_2- | SEQ ID | QVQLVQSGAEVKKPGASVKVSCKASGYTFTSYVMHWVR |
| CD19- | NO: 220 | QAPGQGLEWMGYINPYNDGTKYNEKFQGRVTITSDKSTS |
| NEW_VH_(G | | TAYMELSSLRSEDTAVYYCARGTYYYGTRVFDYWGQGT |
| 4S)2_[CD3]_L | | LVTVSSASTKGPSVFPLAPSSKSTSGGTAALGCLVKDYFPE |
| 1.47_H1.279 | | PVTVSWNSGALTSGVHTFPAVLQSSGLYSLSSVVTVPSSSL |
| VH_G44C_VL | | GTQTYICNVNHKPSNTKVDKKVEPKSCGGGGSGGGGSQA |
| G100C_scFv( | | VVTQEPSLTVSPGGTVTLTCGSSTGAVTTSNYANWVQQK |
| GKPGS)4_(G4 | | PGKSPRGLIGGTNKRAPGVPARFSGSLLGGKAALTISGAQP |
| S)2_Fc(222)_I | | EDEADYYCALWYSNHWVFGCGTKLTVLGKPGSGKPGSG |
| gG1 | | KPGSGKPGSEVQLVESGGGLVQPGGSLRLSCAASGFTFST |
| | | YAMNWVRQAPGKCLEWVGRIRSKYNNYATYYADSVKG |
| | | RFTISRDDSKNTLYLQMNSLRAEDTAVYYCVRHTNFGGE |
| | | YVSWFAYWGQGTLVTVSSGGGGSGGGGSKTHTCPPCPAP |
| | | PVAGPSVFLFPPKPKDTLMISRTPEVTCVVVDVKHEDPEV |
| | | KFNWYVDGVEVHNAKTKPREEQYNSTYRVVSVLTVLHQ |
| | | DWLNGKEYKCKVSNKALPAPIEKTISKAKGQPREPQVYTL |
| | | PPSREQMTKNQVKLTCLVKGFYPSDIAVEWESNGQPENN |
| | | YKTTPPVLDSDGSFFLYSKLTVDKSRWQQGNVFSCSVLHE |
| | | ALHSHYTQKSLSLSPGK |
| Chain_2- | SEQ ID | QVQLVQSGAEVKKPGASVKVSCKASGYTFTSYVMHWVR |
| CD19- | NO: 221 | QAPGQGLEWMGYINPYNDGTKYNEKFQGRVTITSDKSTS |
| NEW_VH_(G | | TAYMELSSLRSEDTAVYYCARGTYYYGTRVFDYWGQGT |
| 4S)2_[CD3]_L | | LVTVSSASTKGPSVFPLAPSSKSTSGGTAALGCLVKDYFPE |
| 1.47_H1.276 | | PVTVSWNSGALTSGVHTFPAVLQSSGLYSLSSVVTVPSSSL |
| VH_G44C_VL | | GTQTYICNVNHKPSNTKVDKKVEPKSCGGGGSGGGGSQA |
| G100C_scFv( | | VVTQEPSLTVSPGGTVTLTCGSSTGAVTTSNYANWVQQK |
| GKPGS)4_(G4 | | PGKSPRGLIGGTNKRAPGVPARFSGSLLGGKAALTISGAQP |
| S)2_Fc(222)_I | | EDEADYYCALWYSNHWVFGCGTKLTVLGKPGSGKPGSG |
| gG1 | | KPGSGKPGSEVQLVESGGGLVQPGGSLRLSCAASGFTFST |
| | | YAMNWVRQAPGKCLEWVGRIRSKANNYATYYADSVKG |
| | | RFTISRDDSKNTLYLQMNSLRAEDTAVYYCVRHENFGGS |
| | | YVSWFAYWGQGTLVTVSSGGGGSGGGGSKTHTCPPCPAP |
| | | PVAGPSVFLFPPKPKDTLMISRTPEVTCVVVDVKHEDPEV |
| | | KFNWYVDGVEVHNAKTKPREEQYNSTYRVVSVLTVLHQ |
| | | DWLNGKEYKCKVSNKALPAPIEKTISKAKGQPREPQVYTL |
| | | PPSREQMTKNQVKLTCLVKGFYPSDIAVEWESNGQPENN |
| | | YKTTPPVLDSDGSFFLYSKLTVDKSRWQQGNVFSCSVLHE |
| | | ALHSHYTQKSLSLSPGK |
| Chain_2- | SEQ ID | QVQLVQSGAEVKKPGASVKVSCKASGYTFTSYVMHWVR |
| CD19- | NO: 222 | QAPGQGLEWMGYINPYNDGTKYNEKFQGRVTITSDKSTS |
| NEW_VH_(G | | TAYMELSSLRSEDTAVYYCARGTYYYGTRVFDYWGQGT |
| 4S)2_[CD3]_L | | LVTVSSASTKGPSVFPLAPSSKSTSGGTAALGCLVKDYFPE |
| 1.47_H1.275 | | PVTVSWNSGALTSGVHTFPAVLQSSGLYSLSSVVTVPSSSL |
| VH_G44C_VL | | GTQTYICNVNHKPSNTKVDKKVEPKSCGGGGSGGGGSQA |
| G100C_scFv( | | VVTQEPSLTVSPGGTVTLTCGSSTGAVTTSNYANWVQQK |
| GKPGS)4_(G4 | | PGKSPRGLIGGTNKRAPGVPARFSGSLLGGKAALTISGAQP |
| S)2_Fc(222)_I | | EDEADYYCALWYSNHWVFGCGTKLTVLGKPGSGKPGSG |
| gG1 | | KPGSGKPGSEVQLVESGGGLVQPGGSLRLSCAASGFTFST |
| | | YAMNWVRQAPGKCLEWVGRIRSKANNYATYYADSVKG |
| | | RFTISRDDSKNTLYLQMNSLRAEDTAVYYCVRHENFGDS |
| | | YVSWFAYWGQGTLVTVSSGGGGSGGGGSKTHTCPPCPAP |
| | | PVAGPSVFLFPPKPKDTLMISRTPEVTCVVVDVKHEDPEV |
| | | KFNWYVDGVEVHNAKTKPREEQYNSTYRVVSVLTVLHQ |
| | | DWLNGKEYKCKVSNKALPAPIEKTISKAKGQPREPQVYTL |
| | | PPSREQMTKNQVKLTCLVKGFYPSDIAVEWESNGQPENN |
| | | YKTTPPVLDSDGSFFLYSKLTVDKSRWQQGNVFSCSVLHE |
| | | ALHSHYTQKSLSLSPGK |
| Chain_2- | SEQ ID | QVQLVQSGAEVKKPGASVKVSCKASGYTFTSYVMHWVR |
| CD19- | NO: 223 | QAPGQGLEWMGYINPYNDGTKYNEKFQGRVTITSDKSTS |
| NEW_VH_(G | | TAYMELSSLRSEDTAVYYCARGTYYYGTRVFDYWGQGT |
| 4S)2_[CD3]_L | | LVTVSSASTKGPSVFPLAPSSKSTSGGTAALGCLVKDYFPE |
| 1.47_H1.274 | | PVTVSWNSGALTSGVHTFPAVLQSSGLYSLSSVVTVPSSSL |
| VH_G44C_VL | | GTQTYICNVNHKPSNTKVDKKVEPKSCGGGGSGGGGSQA |
| G100C_scFv( | | VVTQEPSLTVSPGGTVTLTCGSSTGAVTTSNYANWVQQK |
| GKPGS)4_(G4 | | PGKSPRGLIGGTNKRAPGVPARFSGSLLGGKAALTISGAQP |
| S)2_Fc(222)_I | | EDEADYYCALWYSNHWVFGCGTKLTVLGKPGSGKPGSG |
| gG1 | | KPGSGKPGSEVQLVESGGGLVQPGGSLRLSCAASGFTFST |
| | | YAMNWVRQAPGKCLEWVGRIRSKYNNYATYYADSVKG |
| | | RFTISRDDSKNTLYLQMNSLRAEDTAVYYCVRHENFGGS |
| | | YVSWFAYWGQGTLVTVSSGGGGSGGGGSKTHTCPPCPAP |
| | | PVAGPSVFLFPPKPKDTLMISRTPEVTCVVVDVKHEDPEV |
| | | KFNWYVDGVEVHNAKTKPREEQYNSTYRVVSVLTVLHQ |
| | | DWLNGKEYKCKVSNKALPAPIEKTISKAKGQPREPQVYTL |
| | | PPSREQMTKNQVKLTCLVKGFYPSDIAVEWESNGQPENN |
| | | YKTTPPVLDSDGSFFLYSKLTVDKSRWQQGNVFSCSVLHE |
| | | ALHSHYTQKSLSLSPGK |
| Chain_2- | SEQ ID | QVQLVQSGAEVKKPGASVKVSCKASGYTFTSYVMHWVR |
| CD19- | NO: 224 | QAPGQGLEWMGYINPYNDGTKYNEKFQGRVTITSDKSTS |
| NEW_VH_(G | | TAYMELSSLRSEDTAVYYCARGTYYYGTRVFDYWGQGT |
| 4S)2_[CD3]_L | | LVTVSSASTKGPSVFPLAPSSKSTSGGTAALGCLVKDYFPE |
| 1.47_H1.273 | | PVTVSWNSGALTSGVHTFPAVLQSSGLYSLSSVVTVPSSSL |
| VH_G44C_VL | | GTQTYICNVNHKPSNTKVDKKVEPKSCGGGGSGGGGSQA |
| G100C_scFv( | | VVTQEPSLTVSPGGTVTLTCGSSTGAVTTSNYANWVQQK |
| GKPGS)4_(G4 | | PGKSPRGLIGGTNKRAPGVPARFSGSLLGGKAALTISGAQP |
| S)2_Fc(222)_I | | EDEADYYCALWYSNHWVFGCGTKLTVLGKPGSGKPGSG |
| gG1 | | KPGSGKPGSEVQLVESGGGLVQPGGSLRLSCAASGFTFST |
| | | YAMNWVRQAPGKCLEWVGRIRSKYNNYATYYADSVKG |
| | | RFTISRDDSKNTLYLQMNSLRAEDTAVYYCVRHENFGDS |
| | | YVSWFAYWGQGTLVTVSSGGGGSGGGGSKTHTCPPCPAP |
| | | PVAGPSVFLFPPKPKDTLMISRTPEVTCVVVDVKHEDPEV |
| | | KFNWYVDGVEVHNAKTKPREEQYNSTYRVVSVLTVLHQ |
| | | DWLNGKEYKCKVSNKALPAPIEKTISKAKGQPREPQVYTL |
| | | PPSREQMTKNQVKLTCLVKGFYPSDIAVEWESNGQPENN |
| | | YKTTPPVLDSDGSFFLYSKLTVDKSRWQQGNVFSCSVLHE |
| | | ALHSHYTQKSLSLSPGK |
| Chain_2- | SEQ ID | QVQLVQSGAEVKKPGASVKVSCKASGYTFTSYVMHWVR |
| CD19- | NO: 225 | QAPGQGLEWMGYINPYNDGTKYNEKFQGRVTITSDKSTS |
| NEW_VH_(G | | TAYMELSSLRSEDTAVYYCARGTYYYGTRVFDYWGQGT |
| 4S)2_[CD3]_L | | LVTVSSASTKGPSVFPLAPSSKSTSGGTAALGCLVKDYFPE |
| 1.47_H1.272 | | PVTVSWNSGALTSGVHTFPAVLQSSGLYSLSSVVTVPSSSL |
| VH_G44C_VL | | GTQTYICNVNHKPSNTKVDKKVEPKSCGGGGSGGGGSQA |
| G100C_scFv( | | VVTQEPSLTVSPGGTVTLTCGSSTGAVTTSNYANWVQQK |
| GKPGS)4_(G4 | | PGKSPRGLIGGTNKRAPGVPARFSGSLLGGKAALTISGAQP |
| S)2_Fc(222)_I | | EDEADYYCALWYSNHWVFGCGTKLTVLGKPGSGKPGSG |
| gG1 | | KPGSGKPGSEVQLVESGGGLVQPGGSLRLSCAASGFTFST |
| | | YAMNWVRQAPGKCLEWVGRIRSKANNYATYYADSVKG |
| | | RFTISRDDSKNTLYLQMNSLRAEDTAVYYCVRHTNFGGS |
| | | YVSWFAYWGQGTLVTVSSGGGGSGGGGSKTHTCPPCPAP |
| | | PVAGPSVFLFPPKPKDTLMISRTPEVTCVVVDVKHEDPEV |
| | | KFNWYVDGVEVHNAKTKPREEQYNSTYRVVSVLTVLHQ |
| | | DWLNGKEYKCKVSNKALPAPIEKTISKAKGQPREPQVYTL |
| | | PPSREQMTKNQVKLTCLVKGFYPSDIAVEWESNGQPENN |
| | | YKTTPPVLDSDGSFFLYSKLTVDKSRWQQGNVFSCSVLHE |
| | | ALHSHYTQKSLSLSPGK |
| Chain_2- | SEQ ID | QVQLVQSGAEVKKPGASVKVSCKASGYTFTSYVMHWVR |
| CD19- | NO: 226 | QAPGQGLEWMGYINPYNDGTKYNEKFQGRVTITSDKSTS |
| NEW_VH_(G | | TAYMELSSLRSEDTAVYYCARGTYYYGTRVFDYWGQGT |
| 4S)2_[CD3]_L | | LVTVSSASTKGPSVFPLAPSSKSTSGGTAALGCLVKDYFPE |
| 1.47_H1.271 | | PVTVSWNSGALTSGVHTFPAVLQSSGLYSLSSVVTVPSSSL |
| VH_G44C_VL | | GTQTYICNVNHKPSNTKVDKKVEPKSCGGGGSGGGGSQA |
| G100C_scFv( | | VVTQEPSLTVSPGGTVTLTCGSSTGAVTTSNYANWVQQK |
| GKPGS)4_(G4 | | PGKSPRGLIGGTNKRAPGVPARFSGSLLGGKAALTISGAQP |
| S)2_Fc(222)_I | | EDEADYYCALWYSNHWVFGCGTKLTVLGKPGSGKPGSG |
| gG1 | | KPGSGKPGSEVQLVESGGGLVQPGGSLRLSCAASGFTFST |
| | | YAMNWVRQAPGKCLEWVGRIRSKANNYATYYADSVKG |
| | | RFTISRDDSKNTLYLQMNSLRAEDTAVYYCVRHTNFGDS |
| | | YVSWFAYWGQGTLVTVSSGGGGSGGGGSKTHTCPPCPAP |
| | | PVAGPSVFLFPPKPKDTLMISRTPEVTCVVVDVKHEDPEV |
| | | KFNWYVDGVEVHNAKTKPREEQYNSTYRVVSVLTVLHQ |
| | | DWLNGKEYKCKVSNKALPAPIEKTISKAKGQPREPQVYTL |
| | | PPSREQMTKNQVKLTCLVKGFYPSDIAVEWESNGQPENN |
| | | YKTTPPVLDSDGSFFLYSKLTVDKSRWQQGNVFSCSVLHE |
| | | ALHSHYTQKSLSLSPGK |
| Chain_2- | SEQ ID | QVQLVQSGAEVKKPGASVKVSCKASGYTFTSYVMHWVR |
| CD19- | NO: 227 | QAPGQGLEWMGYINPYNDGTKYNEKFQGRVTITSDKSTS |
| NEW_VH_(G | | TAYMELSSLRSEDTAVYYCARGTYYYGTRVFDYWGQGT |
| 4S)2_[CD3]_L | | LVTVSSASTKGPSVFPLAPSSKSTSGGTAALGCLVKDYFPE |
| 1.47_H1.270 | | PVTVSWNSGALTSGVHTFPAVLQSSGLYSLSSVVTVPSSSL |
| VH_G44C_VL | | GTQTYICNVNHKPSNTKVDKKVEPKSCGGGGSGGGGSQA |
| G100C_scFv( | | VVTQEPSLTVSPGGTVTLTCGSSTGAVTTSNYANWVQQK |
| GKPGS)4_(G4 | | PGKSPRGLIGGTNKRAPGVPARFSGSLLGGKAALTISGAQP |
| S)2_Fc(222)_I | | EDEADYYCALWYSNHWVFGCGTKLTVLGKPGSGKPGSG |
| gG1 | | KPGSGKPGSEVQLVESGGGLVQPGGSLRLSCAASGFTFST |
| | | YAMNWVRQAPGKCLEWVGRIRSKYNNYATYYADSVKG |
| | | RFTISRDDSKNTLYLQMNSLRAEDTAVYYCVRHTNFGGS |
| | | YVSWFAYWGQGTLVTVSSGGGGSGGGGSKTHTCPPCPAP |
| | | PVAGPSVFLFPPKPKDTLMISRTPEVTCVVVDVKHEDPEV |
| | | KFNWYVDGVEVHNAKTKPREEQYNSTYRVVSVLTVLHQ |
| | | DWLNGKEYKCKVSNKALPAPIEKTISKAKGQPREPQVYTL |
| | | PPSREQMTKNQVKLTCLVKGFYPSDIAVEWESNGQPENN |
| | | YKTTPPVLDSDGSFFLYSKLTVDKSRWQQGNVFSCSVLHE |
| | | ALHSHYTQKSLSLSPGK |
| Chain_2- | SEQ ID | QVQLVQSGAEVKKPGASVKVSCKASGYTFTSYVMHWVR |
| CD19- | NO: 228 | QAPGQGLEWMGYINPYNDGTKYNEKFQGRVTITSDKSTS |
| NEW_VH_(G | | TAYMELSSLRSEDTAVYYCARGTYYYGTRVFDYWGQGT |
| 4S)2_[CD3]_L | | LVTVSSASTKGPSVFPLAPSSKSTSGGTAALGCLVKDYFPE |
| 1.47_H1.214 | | PVTVSWNSGALTSGVHTFPAVLQSSGLYSLSSVVTVPSSSL |
| VH_G44C_VL | | GTQTYICNVNHKPSNTKVDKKVEPKSCGGGGSGGGGSQA |
| G100C_scFv( | | VVTQEPSLTVSPGGTVTLTCGSSTGAVTTSNYANWVQQK |
| GKPGS)4_(G4 | | PGKSPRGLIGGTNKRAPGVPARFSGSLLGGKAALTISGAQP |
| S)2_Fc(222)_I | | EDEADYYCALWYSNHWVFGCGTKLTVLGKPGSGKPGSG |
| gG1 | | KPGSGKPGSEVQLVESGGGLVQPGGSLRLSCAASGFTFST |
| | | YAMNWVRQAPGKCLEWVGRIRSKYNNYATYYADSVKG |
| | | RFTISRDDSKNTLYLQMNSLRAEDTAVYYCVRHTNFGDS |
| | | YVSWFAYWGQGTLVTVSSGGGGSGGGGSKTHTCPPCPAP |
| | | PVAGPSVFLFPPKPKDTLMISRTPEVTCVVVDVKHEDPEV |
| | | KFNWYVDGVEVHNAKTKPREEQYNSTYRVVSVLTVLHQ |
| | | DWLNGKEYKCKVSNKALPAPIEKTISKAKGQPREPQVYTL |
| | | PPSREQMTKNQVKLTCLVKGFYPSDIAVEWESNGQPENN |
| | | YKTTPPVLDSDGSFFLYSKLTVDKSRWQQGNVFSCSVLHE |
| | | ALHSHYTQKSLSLSPGK |
| Chain_2- | SEQ ID | QVQLVQSGAEVKKPGASVKVSCKASGYTFTSYVMHWVR |
| CD19- | NO: 229 | QAPGQGLEWMGYINPYNDGTKYNEKFQGRVTITSDKSTS |
| NEW_VH_(G | | TAYMELSSLRSEDTAVYYCARGTYYYGTRVFDYWGQGT |
| 4S)2_[CD3]_L | | LVTVSSASTKGPSVFPLAPSSKSTSGGTAALGCLVKDYFPE |
| 1.47_H1.89_sc | | PVTVSWNSGALTSGVHTFPAVLQSSGLYSLSSVVTVPSSSL |
| Fv(GKPGS)4 | | GTQTYICNVNHKPSNTKVDKKVEPKSCGGGGSGGGGSQA |
| Fc(216)_IgG1 | | VVTQEPSLTVSPGGTVTLTCGSSTGAVTTSNYANWVQQK |
| | | PGKSPRGLIGGTNKRAPGVPARFSGSLLGGKAALTISGAQP |
| | | EDEADYYCALWYSNHWVFGGGTKLTVLGKPGSGKPGSG |
| | | KPGSGKPGSEVQLVESGGGLVQPGGSLRLSCAASGFTFST |
| | | YAMNWVRQAPGKGLEWVGRIRSKYNNYATYYADSVKG |
| | | RFTISRDDSKNTLYLQMNSLRAEDTAVYYCVRHGNFGDE |
| | | YVSWFAYWGQGTLVTVSSEPKSSDKTHTCPPCPAPPVAGP |
| | | SVFLFPPKPKDTLMISRTPEVTCVVVDVKHEDPEVKFNWY |
| | | VDGVEVHNAKTKPREEQYNSTYRVVSVLTVLHQDWLNG |
| | | KEYKCKVSNKALPAPIEKTISKAKGQPREPQVYTLPPSREQ |
| | | MTKNQVKLTCLVKGFYPSDIAVEWESNGQPENNYKTTPP |
| | | VLDSDGSFFLYSKLTVDKSRWQQGNVFSCSVLHEALHSH |
| | | YTQKSLSLSPGK |
| Chain_2- | SEQ ID | QVQLVQSGAEVKKPGASVKVSCKASGYTFTSYVMHWVR |
| CD19- | NO: 230 | QAPGQGLEWMGYINPYNDGTKYNEKFQGRVTITSDKSTS |
| NEW_VH_(G | | TAYMELSSLRSEDTAVYYCARGTYYYGTRVFDYWGQGT |
| 4S)2_[CD3]_L | | LVTVSSASTKGPSVFPLAPSSKSTSGGTAALGCLVKDYFPE |
| 1.47_H1.32_sc | | PVTVSWNSGALTSGVHTFPAVLQSSGLYSLSSVVTVPSSSL |
| Fv(GKPGS)4 | | GTQTYICNVNHKPSNTKVDKKVEPKSCGGGGSGGGGSQA |
| (G4S)2_Fc(22 | | VVTQEPSLTVSPGGTVTLTCGSSTGAVTTSNYANWVQQK |
| 2)_IgG1 | | PGKSPRGLIGGTNKRAPGVPARFSGSLLGGKAALTISGAQP |
| | | EDEADYYCALWYSNHWVFGGGTKLTVLGKPGSGKPGSG |
| | | KPGSGKPGSEVQLVESGGGLVQPGGSLRLSCAASGFTFST |
| | | YAMNWVRQAPGKGLEWVGRIRSKANNYATYYADSVKG |
| | | RFTISRDDSKNTLYLQMNSLRAEDTAVYYCVRHGNFGDS |
| | | YVSWFAYWGQGTLVTVSSGGGGSGGGGSKTHTCPPCPAP |
| | | PVAGPSVFLFPPKPKDTLMISRTPEVTCVVVDVKHEDPEV |
| | | KFNWYVDGVEVHNAKTKPREEQYNSTYRVVSVLTVLHQ |
| | | DWLNGKEYKCKVSNKALPAPIEKTISKAKGQPREPQVYTL |
| | | PPSREQMTKNQVKLTCLVKGFYPSDIAVEWESNGQPENN |
| | | YKTTPPVLDSDGSFFLYSKLTVDKSRWQQGNVFSCSVLHE |
| | | ALHSHYTQKSLSLSPGK |
| Chain_2- | SEQ ID | QVQLVQSGAEVKKPGASVKVSCKASGYTFTSYVMHWVR |
| CD19- | NO: 231 | QAPGQGLEWMGYINPYNDGTKYNEKFQGRVTITSDKSTS |
| NEW_VH_(G | | TAYMELSSLRSEDTAVYYCARGTYYYGTRVFDYWGQGT |
| 4S)2_[CD3]_H | | LVTVSSASTKGPSVFPLAPSSKSTSGGTAALGCLVKDYFPE |
| 1.30_L1.47_sc | | PVTVSWNSGALTSGVHTFPAVLQSSGLYSLSSVVTVPSSSL |
| Fv(GKPGS)4 | | GTQTYICNVNHKPSNTKVDKKVEPKSCGGGGSGGGGSEV |
| (G4S)2_Fc(22 | | QLVESGGGLVQPGGSLRLSCAASGFTFSTYAMNWVRQAP |
| 2)_IgG1 | | GKGLEWVGRIRSKYNNYATYYADSVKGRFTISRDDSKNT |
| | | LYLQMNSLRAEDTAVYYCVRHGNFGDSYVSWFAYWGQ |
| | | GTLVTVSSGKPGSGKPGSGKPGSGKPGSQAVVTQEPSLTV |
| | | SPGGTVTLTCGSSTGAVTTSNYANWVQQKPGKSPRGLIGG |
| | | TNKRAPGVPARFSGSLLGGKAALTISGAQPEDEADYYCAL |
| | | WYSNHWVFGGGTKLTVLGGGGSGGGGSKTHTCPPCPAPP |
| | | VAGPSVFLFPPKPKDTLMISRTPEVTCVVVDVKHEDPEVK |
| | | FNWYVDGVEVHNAKTKPREEQYNSTYRVVSVLTVLHQD |
| | | WLNGKEYKCKVSNKALPAPIEKTISKAKGQPREPQVYTLP |
| | | PSREQMTKNQVKLTCLVKGFYPSDIAVEWESNGQPENNY |
| | | KTTPPVLDSDGSFFLYSKLTVDKSRWQQGNVFSCSVLHEA |
| | | LHSHYTQKSLSLSPGK |
| Chain_1- | SEQ ID | EVQLVESGGGLVKPGGSLKLSCAASGYTFTSYVMHWVRQ |
| CD19- | NO: 232 | APGKGLEWIGYINPYNDGTKYNEKFQGRVTISSDKSISTAY |
| OG_VHb_IgG | | MELSSLRSEDTAMYYCARGTYYYGTRVFDYWGQGTLVT |
| 1 | | VSSASTKGPSVFPLAPSSKSTSGGTAALGCLVKDYFPEPVT |
| | | VSWNSGALTSGVHTFPAVLQSSGLYSLSSVVTVPSSSLGT |
| | | QTYICNVNHKPSDTKVDKKVEPKSCDKTHTCPPCPAPPVA |
| | | GPSVFLFPPKPKDTLMISRTPEVTCVVVDVKHEDPEVKEN |
| | | WYVDGVEVHNAKTKPREEEYNSTYRVVSVLTVLHQDWL |
| | | NGKEYKCKVSNKALPAPIEKTISKAKGQPREPQVYTLPPSR |
| | | EEMTKNQVSLTCDVSGFYPSDIAVEWESDGQPENNYKTTP |
| | | PVLDSDGSFFLYSKLTVDKSRWEQGDVFSCSVLHEALHSH |
| | | YTQKSLSLSPGK |
| Chain_2- | SEQ ID | EVQLVESGGGLVKPGGSLKLSCAASGYTFTSYVMHWVRQ |
| CD19- | NO: 233 | APGKGLEWIGYINPYNDGTKYNEKFQGRVTISSDKSISTAY |
| OG_VH_(G4S | | MELSSLRSEDTAMYYCARGTYYYGTRVFDYWGQGTLVT |
| )2_[CD3]_L1. | | VSSASTKGPSVFPLAPSSKSTSGGTAALGCLVKDYFPEPVT |
| 47_H1.280_V | | VSWNSGALTSGVHTFPAVLQSSGLYSLSSVVTVPSSSLGT |
| H_G44C_VL | | QTYICNVNHKPSNTKVDKKVEPKSCGGGGSGGGGSQAVV |
| G100C_scFv( | | TQEPSLTVSPGGTVTLTCGSSTGAVTTSNYANWVQQKPG |
| GKPGS)4_(G4 | | KSPRGLIGGTNKRAPGVPARFSGSLLGGKAALTISGAQPED |
| S)2_Fc(222)_ | | EADYYCALWYSNHWVFGCGTKLTVLGKPGSGKPGSGKP |
| IgG1 | | GSGKPGSEVQLVESGGGLVQPGGSLRLSCAASGFTFSTYA |
| | | MNWVRQAPGKCLEWVGRIRSKYNNYATYYADSVKGRFT |
| | | ISRDDSKNTLYLQMNSLRAEDTAVYYCVRHENFGGEYVS |
| | | WFAYWGQGTLVTVSSGGGGSGGGGSKTHTCPPCPAPPVA |
| | | GPSVFLFPPKPKDTLMISRTPEVTCVVVDVKHEDPEVKFN |
| | | WYVDGVEVHNAKTKPREEQYNSTYRVVSVLTVLHQDWL |
| | | NGKEYKCKVSNKALPAPIEKTISKAKGQPREPQVYTLPPSR |
| | | EQMTKNQVKLTCLVKGFYPSDIAVEWESNGQPENNYKTT |
| | | PPVLDSDGSFFLYSKLTVDKSRWQQGNVFSCSVLHEALHS |
| | | HYTQKSLSLSPGK |
| Chain_2- | SEQ ID | EVQLVESGGGLVKPGGSLKLSCAASGYTFTSYVMHWVRQ |
| CD19- | NO: 234 | APGKGLEWIGYINPYNDGTKYNEKFQGRVTISSDKSISTAY |
| OG_VH_(G4S | | MELSSLRSEDTAMYYCARGTYYYGTRVFDYWGQGTLVT |
| )2_[CD3]_L1. | | VSSASTKGPSVFPLAPSSKSTSGGTAALGCLVKDYFPEPVT |
| 47_H1.279_V | | VSWNSGALTSGVHTFPAVLQSSGLYSLSSVVTVPSSSLGT |
| H_G44C_VL | | QTYICNVNHKPSNTKVDKKVEPKSCGGGGSGGGGSQAVV |
| G100C_scFv( | | TQEPSLTVSPGGTVTLTCGSSTGAVTTSNYANWVQQKPG |
| GKPGS)4_(G4 | | KSPRGLIGGTNKRAPGVPARFSGSLLGGKAALTISGAQPED |
| S)2_Fc(222)_ | | EADYYCALWYSNHWVFGCGTKLTVLGKPGSGKPGSGKP |
| IgG1 | | GSGKPGSEVQLVESGGGLVQPGGSLRLSCAASGFTFSTYA |
| | | MNWVRQAPGKCLEWVGRIRSKYNNYATYYADSVKGRFT |
| | | ISRDDSKNTLYLQMNSLRAEDTAVYYCVRHTNFGGEYVS |
| | | WFAYWGQGTLVTVSSGGGGSGGGGSKTHTCPPCPAPPVA |
| | | GPSVFLFPPKPKDTLMISRTPEVTCVVVDVKHEDPEVKFN |
| | | WYVDGVEVHNAKTKPREEQYNSTYRVVSVLTVLHQDWL |
| | | NGKEYKCKVSNKALPAPIEKTISKAKGQPREPQVYTLPPSR |
| | | EQMTKNQVKLTCLVKGFYPSDIAVEWESNGQPENNYKTT |
| | | PPVLDSDGSFFLYSKLTVDKSRWQQGNVFSCSVLHEALHS |
| | | HYTQKSLSLSPGK |
| Chain_2- | SEQ ID | EVQLVESGGGLVKPGGSLKLSCAASGYTFTSYVMHWVRQ |
| CD19- | NO: 235 | APGKGLEWIGYINPYNDGTKYNEKFQGRVTISSDKSISTAY |
| OG_VH_(G4S | | MELSSLRSEDTAMYYCARGTYYYGTRVFDYWGQGTLVT |
| )2_[CD3]_L1. | | VSSASTKGPSVFPLAPSSKSTSGGTAALGCLVKDYFPEPVT |
| 47_H1.276_V | | VSWNSGALTSGVHTFPAVLQSSGLYSLSSVVTVPSSSLGT |
| H_G44C_VL | | QTYICNVNHKPSNTKVDKKVEPKSCGGGGSGGGGSQAVV |
| G100C_scFv( | | TQEPSLTVSPGGTVTLTCGSSTGAVTTSNYANWVQQKPG |
| GKPGS)4_(G4 | | KSPRGLIGGTNKRAPGVPARFSGSLLGGKAALTISGAQPED |
| S)2_Fc(222)_ | | EADYYCALWYSNHWVFGCGTKLTVLGKPGSGKPGSGKP |
| IgG1 | | GSGKPGSEVQLVESGGGLVQPGGSLRLSCAASGFTFSTYA |
| | | MNWVRQAPGKCLEWVGRIRSKANNYATYYADSVKGRFT |
| | | ISRDDSKNTLYLQMNSLRAEDTAVYYCVRHENFGGSYVS |
| | | WFAYWGQGTLVTVSSGGGGSGGGGSKTHTCPPCPAPPVA |
| | | GPSVFLFPPKPKDTLMISRTPEVTCVVVDVKHEDPEVKFN |
| | | WYVDGVEVHNAKTKPREEQYNSTYRVVSVLTVLHQDWL |
| | | NGKEYKCKVSNKALPAPIEKTISKAKGQPREPQVYTLPPSR |
| | | EQMTKNQVKLTCLVKGFYPSDIAVEWESNGQPENNYKTT |
| | | PPVLDSDGSFFLYSKLTVDKSRWQQGNVFSCSVLHEALHS |
| | | HYTQKSLSLSPGK |
| Chain_2- | SEQ ID | EVQLVESGGGLVKPGGSLKLSCAASGYTFTSYVMHWVRQ |
| CD19- | NO: 236 | APGKGLEWIGYINPYNDGTKYNEKFQGRVTISSDKSISTAY |
| OG_VH_(G4S | | MELSSLRSEDTAMYYCARGTYYYGTRVFDYWGQGTLVT |
| )2_[CD3]_L1. | | VSSASTKGPSVFPLAPSSKSTSGGTAALGCLVKDYFPEPVT |
| 47_H1.275_V | | VSWNSGALTSGVHTFPAVLQSSGLYSLSSVVTVPSSSLGT |
| H_G44C_VL | | QTYICNVNHKPSNTKVDKKVEPKSCGGGGSGGGGSQAVV |
| G100C_scFv( | | TQEPSLTVSPGGTVTLTCGSSTGAVTTSNYANWVQQKPG |
| GKPGS)4_(G4 | | KSPRGLIGGTNKRAPGVPARFSGSLLGGKAALTISGAQPED |
| S)2_Fc(222)_I | | EADYYCALWYSNHWVFGCGTKLTVLGKPGSGKPGSGKP |
| gG1 | | GSGKPGSEVQLVESGGGLVQPGGSLRLSCAASGFTFSTYA |
| | | MNWVRQAPGKCLEWVGRIRSKANNYATYYADSVKGRFT |
| | | ISRDDSKNTLYLQMNSLRAEDTAVYYCVRHENFGDSYVS |
| | | WFAYWGQGTLVTVSSGGGGSGGGGSKTHTCPPCPAPPVA |
| | | GPSVFLFPPKPKDTLMISRTPEVTCVVVDVKHEDPEVKFN |
| | | WYVDGVEVHNAKTKPREEQYNSTYRVVSVLTVLHQDWL |
| | | NGKEYKCKVSNKALPAPIEKTISKAKGQPREPQVYTLPPSR |
| | | EQMTKNQVKLTCLVKGFYPSDIAVEWESNGQPENNYKTT |
| | | PPVLDSDGSFFLYSKLTVDKSRWQQGNVFSCSVLHEALHS |
| | | HYTQKSLSLSPGK |
| Chain_2- | SEQ ID | EVQLVESGGGLVKPGGSLKLSCAASGYTFTSYVMHWVRQ |
| CD19- | NO: 237 | APGKGLEWIGYINPYNDGTKYNEKFQGRVTISSDKSISTAY |
| OG_VH_(G4S | | MELSSLRSEDTAMYYCARGTYYYGTRVFDYWGQGTLVT |
| )2_[CD3]_L1. | | VSSASTKGPSVFPLAPSSKSTSGGTAALGCLVKDYFPEPVT |
| 47_H1.274_V | | VSWNSGALTSGVHTFPAVLQSSGLYSLSSVVTVPSSSLGT |
| H_G44C_VL | | QTYICNVNHKPSNTKVDKKVEPKSCGGGGSGGGGSQAVV |
| G100C_scFv( | | TQEPSLTVSPGGTVTLTCGSSTGAVTTSNYANWVQQKPG |
| GKPGS)4_(G4 | | KSPRGLIGGTNKRAPGVPARFSGSLLGGKAALTISGAQPED |
| S)2_Fc(222)_I | | EADYYCALWYSNHWVFGCGTKLTVLGKPGSGKPGSGKP |
| gG1 | | GSGKPGSEVQLVESGGGLVQPGGSLRLSCAASGFTFSTYA |
| | | MNWVRQAPGKCLEWVGRIRSKYNNYATYYADSVKGRFT |
| | | ISRDDSKNTLYLQMNSLRAEDTAVYYCVRHENFGGSYVS |
| | | WFAYWGQGTLVTVSSGGGGSGGGGSKTHTCPPCPAPPVA |
| | | GPSVFLFPPKPKDTLMISRTPEVTCVVVDVKHEDPEVKFN |
| | | WYVDGVEVHNAKTKPREEQYNSTYRVVSVLTVLHQDWL |
| | | NGKEYKCKVSNKALPAPIEKTISKAKGQPREPQVYTLPPSR |
| | | EQMTKNQVKLTCLVKGFYPSDIAVEWESNGQPENNYKTT |
| | | PPVLDSDGSFFLYSKLTVDKSRWQQGNVFSCSVLHEALHS |
| | | HYTQKSLSLSPGK |
| Chain_2- | SEQ ID | EVQLVESGGGLVKPGGSLKLSCAASGYTFTSYVMHWVRQ |
| CD19- | NO: 238 | APGKGLEWIGYINPYNDGTKYNEKFQGRVTISSDKSISTAY |
| OG_VH_(G4S | | MELSSLRSEDTAMYYCARGTYYYGTRVFDYWGQGTLVT |
| )2_[CD3]_L1. | | VSSASTKGPSVFPLAPSSKSTSGGTAALGCLVKDYFPEPVT |
| 47_H1.273_V | | VSWNSGALTSGVHTFPAVLQSSGLYSLSSVVTVPSSSLGT |
| H_G44C_VL | | QTYICNVNHKPSNTKVDKKVEPKSCGGGGSGGGGSQAVV |
| G100C_scFv( | | TQEPSLTVSPGGTVTLTCGSSTGAVTTSNYANWVQQKPG |
| GKPGS)4_(G4 | | KSPRGLIGGTNKRAPGVPARFSGSLLGGKAALTISGAQPED |
| S)2_Fc(222)_I | | EADYYCALWYSNHWVFGCGTKLTVLGKPGSGKPGSGKP |
| gG1 | | GSGKPGSEVQLVESGGGLVQPGGSLRLSCAASGFTFSTYA |
| | | MNWVRQAPGKCLEWVGRIRSKYNNYATYYADSVKGRFT |
| | | ISRDDSKNTLYLQMNSLRAEDTAVYYCVRHENFGDSYVS |
| | | WFAYWGQGTLVTVSSGGGGSGGGGSKTHTCPPCPAPPVA |
| | | GPSVFLFPPKPKDTLMISRTPEVTCVVVDVKHEDPEVKFN |
| | | WYVDGVEVHNAKTKPREEQYNSTYRVVSVLTVLHQDWL |
| | | NGKEYKCKVSNKALPAPIEKTISKAKGQPREPQVYTLPPSR |
| | | EQMTKNQVKLTCLVKGFYPSDIAVEWESNGQPENNYKTT |
| | | PPVLDSDGSFFLYSKLTVDKSRWQQGNVFSCSVLHEALHS |
| | | HYTQKSLSLSPGK |
| Chain_2- | SEQ ID | EVQLVESGGGLVKPGGSLKLSCAASGYTFTSYVMHWVRQ |
| CD19- | NO: 239 | APGKGLEWIGYINPYNDGTKYNEKFQGRVTISSDKSISTAY |
| OG_VH_(G4S | | MELSSLRSEDTAMYYCARGTYYYGTRVFDYWGQGTLVT |
| )2_[CD3]_L1. | | VSSASTKGPSVFPLAPSSKSTSGGTAALGCLVKDYFPEPVT |
| 47_H1.272_V | | VSWNSGALTSGVHTFPAVLQSSGLYSLSSVVTVPSSSLGT |
| H_G44C_VL | | QTYICNVNHKPSNTKVDKKVEPKSCGGGGSGGGGSQAVV |
| G100C_scFv( | | TQEPSLTVSPGGTVTLTCGSSTGAVTTSNYANWVQQKPG |
| GKPGS)4_(G4 | | KSPRGLIGGTNKRAPGVPARFSGSLLGGKAALTISGAQPED |
| S)2_Fc(222)_I | | EADYYCALWYSNHWVFGCGTKLTVLGKPGSGKPGSGKP |
| gG1 | | GSGKPGSEVQLVESGGGLVQPGGSLRLSCAASGFTFSTYA |
| | | MNWVRQAPGKCLEWVGRIRSKANNYATYYADSVKGRFT |
| | | ISRDDSKNTLYLQMNSLRAEDTAVYYCVRHTNFGGSYVS |
| | | WFAYWGQGTLVTVSSGGGGSGGGGSKTHTCPPCPAPPVA |
| | | GPSVFLFPPKPKDTLMISRTPEVTCVVVDVKHEDPEVKFN |
| | | WYVDGVEVHNAKTKPREEQYNSTYRVVSVLTVLHQDWL |
| | | NGKEYKCKVSNKALPAPIEKTISKAKGQPREPQVYTLPPSR |
| | | EQMTKNQVKLTCLVKGFYPSDIAVEWESNGQPENNYKTT |
| | | PPVLDSDGSFFLYSKLTVDKSRWQQGNVFSCSVLHEALHS |
| | | HYTQKSLSLSPGK |
| Chain_2- | SEQ ID | EVQLVESGGGLVKPGGSLKLSCAASGYTFTSYVMHWVRQ |
| CD19- | NO: 240 | APGKGLEWIGYINPYNDGTKYNEKFQGRVTISSDKSISTAY |
| OG_VH_(G4S | | MELSSLRSEDTAMYYCARGTYYYGTRVFDYWGQGTLVT |
| )2_[CD3]_L1. | | VSSASTKGPSVFPLAPSSKSTSGGTAALGCLVKDYFPEPVT |
| 47_H1.271_V | | VSWNSGALTSGVHTFPAVLQSSGLYSLSSVVTVPSSSLGT |
| H_G44C_VL | | QTYICNVNHKPSNTKVDKKVEPKSCGGGGSGGGGSQAVV |
| G100C_scFv( | | TQEPSLTVSPGGTVTLTCGSSTGAVTTSNYANWVQQKPG |
| GKPGS)4_(G4 | | KSPRGLIGGTNKRAPGVPARFSGSLLGGKAALTISGAQPED |
| S)2_Fc(222)_I | | EADYYCALWYSNHWVFGCGTKLTVLGKPGSGKPGSGKP |
| gG1 | | GSGKPGSEVQLVESGGGLVQPGGSLRLSCAASGFTFSTYA |
| | | MNWVRQAPGKCLEWVGRIRSKANNYATYYADSVKGRFT |
| | | ISRDDSKNTLYLQMNSLRAEDTAVYYCVRHTNFGDSYVS |
| | | WFAYWGQGTLVTVSSGGGGSGGGGSKTHTCPPCPAPPVA |
| | | GPSVFLFPPKPKDTLMISRTPEVTCVVVDVKHEDPEVKFN |
| | | WYVDGVEVHNAKTKPREEQYNSTYRVVSVLTVLHQDWL |
| | | NGKEYKCKVSNKALPAPIEKTISKAKGQPREPQVYTLPPSR |
| | | EQMTKNQVKLTCLVKGFYPSDIAVEWESNGQPENNYKTT |
| | | PPVLDSDGSFFLYSKLTVDKSRWQQGNVFSCSVLHEALHS |
| | | HYTQKSLSLSPGK |
| Chain_2- | SEQ ID | EVQLVESGGGLVKPGGSLKLSCAASGYTFTSYVMHWVRQ |
| CD19- | NO: 241 | APGKGLEWIGYINPYNDGTKYNEKFQGRVTISSDKSISTAY |
| OG_VH_(G4S | | MELSSLRSEDTAMYYCARGTYYYGTRVFDYWGQGTLVT |
| )2_[CD3]_L1. | | VSSASTKGPSVFPLAPSSKSTSGGTAALGCLVKDYFPEPVT |
| 47_H1.270_V | | VSWNSGALTSGVHTFPAVLQSSGLYSLSSVVTVPSSSLGT |
| H_G44C_VL | | QTYICNVNHKPSNTKVDKKVEPKSCGGGGSGGGGSQAVV |
| G100C_scFv( | | TQEPSLTVSPGGTVTLTCGSSTGAVTTSNYANWVQQKPG |
| GKPGS)4_(G4 | | KSPRGLIGGTNKRAPGVPARFSGSLLGGKAALTISGAQPED |
| S)2_Fc(222)_I | | EADYYCALWYSNHWVFGCGTKLTVLGKPGSGKPGSGKP |
| gG1 | | GSGKPGSEVQLVESGGGLVQPGGSLRLSCAASGFTFSTYA |
| | | MNWVRQAPGKCLEWVGRIRSKYNNYATYYADSVKGRFT |
| | | ISRDDSKNTLYLQMNSLRAEDTAVYYCVRHTNFGGSYVS |
| | | WFAYWGQGTLVTVSSGGGGSGGGGSKTHTCPPCPAPPVA |
| | | GPSVFLFPPKPKDTLMISRTPEVTCVVVDVKHEDPEVKEN |
| | | WYVDGVEVHNAKTKPREEQYNSTYRVVSVLTVLHQDWL |
| | | NGKEYKCKVSNKALPAPIEKTISKAKGQPREPQVYTLPPSR |
| | | EQMTKNQVKLTCLVKGFYPSDIAVEWESNGQPENNYKTT |
| | | PPVLDSDGSFFLYSKLTVDKSRWQQGNVFSCSVLHEALHS |
| | | HYTQKSLSLSPGK |
| Chain_2- | SEQ ID | EVQLVESGGGLVKPGGSLKLSCAASGYTFTSYVMHWVRQ |
| CD19- | NO: 242 | APGKGLEWIGYINPYNDGTKYNEKFQGRVTISSDKSISTAY |
| OG_VH_(G4S | | MELSSLRSEDTAMYYCARGTYYYGTRVFDYWGQGTLVT |
| )2_[CD3]_L1. | | VSSASTKGPSVFPLAPSSKSTSGGTAALGCLVKDYFPEPVT |
| 47_H1.214_V | | VSWNSGALTSGVHTFPAVLQSSGLYSLSSVVTVPSSSLGT |
| H_G44C_VL | | QTYICNVNHKPSNTKVDKKVEPKSCGGGGSGGGGSQAVV |
| G100C_scFv( | | TQEPSLTVSPGGTVTLTCGSSTGAVTTSNYANWVQQKPG |
| GKPGS)4_(G4 | | KSPRGLIGGTNKRAPGVPARFSGSLLGGKAALTISGAQPED |
| S)2_Fc(222)_I | | EADYYCALWYSNHWVFGCGTKLTVLGKPGSGKPGSGKP |
| gG1 | | GSGKPGSEVQLVESGGGLVQPGGSLRLSCAASGFTFSTYA |
| | | MNWVRQAPGKCLEWVGRIRSKYNNYATYYADSVKGRFT |
| | | ISRDDSKNTLYLQMNSLRAEDTAVYYCVRHTNFGDSYVS |
| | | WFAYWGQGTLVTVSSGGGGSGGGGSKTHTCPPCPAPPVA |
| | | GPSVFLFPPKPKDTLMISRTPEVTCVVVDVKHEDPEVKEN |
| | | WYVDGVEVHNAKTKPREEQYNSTYRVVSVLTVLHQDWL |
| | | NGKEYKCKVSNKALPAPIEKTISKAKGQPREPQVYTLPPSR |
| | | EQMTKNQVKLTCLVKGFYPSDIAVEWESNGQPENNYKTT |
| | | PPVLDSDGSFFLYSKLTVDKSRWQQGNVFSCSVLHEALHS |
| | | HYTQKSLSLSPGK |
| Chain_2- | SEQ ID | EVQLVESGGGLVKPGGSLKLSCAASGYTFTSYVMHWVRQ |
| CD19- | NO: 243 | APGKGLEWIGYINPYNDGTKYNEKFQGRVTISSDKSISTAY |
| OG_VH_(G4S | | MELSSLRSEDTAMYYCARGTYYYGTRVFDYWGQGTLVT |
| )2_[CD3]_L1. | | VSSASTKGPSVFPLAPSSKSTSGGTAALGCLVKDYFPEPVT |
| 47_H1.89_scF | | VSWNSGALTSGVHTFPAVLQSSGLYSLSSVVTVPSSSLGT |
| v(GKPGS)4_F | | QTYICNVNHKPSNTKVDKKVEPKSCGGGGSGGGGSQAVV |
| c(216)_IgG1 | | TQEPSLTVSPGGTVTLTCGSSTGAVTTSNYANWVQQKPG |
| | | KSPRGLIGGTNKRAPGVPARFSGSLLGGKAALTISGAQPED |
| | | EADYYCALWYSNHWVFGGGTKLTVLGKPGSGKPGSGKP |
| | | GSGKPGSEVQLVESGGGLVQPGGSLRLSCAASGFTFSTYA |
| | | MNWVRQAPGKGLEWVGRIRSKYNNYATYYADSVKGRFT |
| | | ISRDDSKNTLYLQMNSLRAEDTAVYYCVRHGNFGDEYVS |
| | | WFAYWGQGTLVTVSSEPKSSDKTHTCPPCPAPPVAGPSVF |
| | | LFPPKPKDTLMISRTPEVTCVVVDVKHEDPEVKFNWYVD |
| | | GVEVHNAKTKPREEQYNSTYRVVSVLTVLHQDWLNGKE |
| | | YKCKVSNKALPAPIEKTISKAKGQPREPQVYTLPPSREQMT |
| | | KNQVKLTCLVKGFYPSDIAVEWESNGQPENNYKTTPPVL |
| | | DSDGSFFLYSKLTVDKSRWQQGNVFSCSVLHEALHSHYT |
| | | QKSLSLSPGK |
| Chain_2- | SEQ ID | EVQLVESGGGLVKPGGSLKLSCAASGYTFTSYVMHWVRQ |
| CD19- | NO: 244 | APGKGLEWIGYINPYNDGTKYNEKFQGRVTISSDKSISTAY |
| OG_VH_(G4S | | MELSSLRSEDTAMYYCARGTYYYGTRVFDYWGQGTLVT |
| )2_[CD3]_L1. | | VSSASTKGPSVFPLAPSSKSTSGGTAALGCLVKDYFPEPVT |
| 47_H1.32_scF | | VSWNSGALTSGVHTFPAVLQSSGLYSLSSVVTVPSSSLGT |
| v(GKPGS)4_( | | QTYICNVNHKPSNTKVDKKVEPKSCGGGGSGGGGSQAVV |
| G4S)2_Fc(222 | | TQEPSLTVSPGGTVTLTCGSSTGAVTTSNYANWVQQKPG |
| )_IgG1 | | KSPRGLIGGTNKRAPGVPARFSGSLLGGKAALTISGAQPED |
| | | EADYYCALWYSNHWVFGGGTKLTVLGKPGSGKPGSGKP |
| | | GSGKPGSEVQLVESGGGLVQPGGSLRLSCAASGFTFSTYA |
| | | MNWVRQAPGKGLEWVGRIRSKANNYATYYADSVKGRFT |
| | | ISRDDSKNTLYLQMNSLRAEDTAVYYCVRHGNFGDSYVS |
| | | WFAYWGQGTLVTVSSGGGGSGGGGSKTHTCPPCPAPPVA |
| | | GPSVFLFPPKPKDTLMISRTPEVTCVVVDVKHEDPEVKEN |
| | | WYVDGVEVHNAKTKPREEQYNSTYRVVSVLTVLHQDWL |
| | | NGKEYKCKVSNKALPAPIEKTISKAKGQPREPQVYTLPPSR |
| | | EQMTKNQVKLTCLVKGFYPSDIAVEWESNGQPENNYKTT |
| | | PPVLDSDGSFFLYSKLTVDKSRWQQGNVFSCSVLHEALHS |
| | | HYTQKSLSLSPGK |
| Chain_2- | SEQ ID | EVQLVESGGGLVKPGGSLKLSCAASGYTFTSYVMHWVRQ |
| CD19- | NO: 245 | APGKGLEWIGYINPYNDGTKYNEKFQGRVTISSDKSISTAY |
| OG_VH_(G4S | | MELSSLRSEDTAMYYCARGTYYYGTRVFDYWGQGTLVT |
| )2_[CD3]_H1. | | VSSASTKGPSVFPLAPSSKSTSGGTAALGCLVKDYFPEPVT |
| 30_L1.47_scF | | VSWNSGALTSGVHTFPAVLQSSGLYSLSSVVTVPSSSLGT |
| v(GKPGS)4_( | | QTYICNVNHKPSNTKVDKKVEPKSCGGGGSGGGGSEVQL |
| G4S)2_Fc(222 | | VESGGGLVQPGGSLRLSCAASGFTFSTYAMNWVRQAPGK |
| )_IgG1 | | GLEWVGRIRSKYNNYATYYADSVKGRFTISRDDSKNTLY |
| | | LQMNSLRAEDTAVYYCVRHGNFGDSYVSWFAYWGQGTL |
| | | VTVSSGKPGSGKPGSGKPGSGKPGSQAVVTQEPSLTVSPG |
| | | GTVTLTCGSSTGAVTTSNYANWVQQKPGKSPRGLIGGTN |
| | | KRAPGVPARFSGSLLGGKAALTISGAQPEDEADYYCALW |
| | | YSNHWVFGGGTKLTVLGGGGSGGGGSKTHTCPPCPAPPV |
| | | AGPSVFLFPPKPKDTLMISRTPEVTCVVVDVKHEDPEVKF |
| | | NWYVDGVEVHNAKTKPREEQYNSTYRVVSVLTVLHQDW |
| | | LNGKEYKCKVSNKALPAPIEKTISKAKGQPREPQVYTLPPS |
| | | REQMTKNQVKLTCLVKGFYPSDIAVEWESNGQPENNYKT |
| | | TPPVLDSDGSFFLYSKLTVDKSRWQQGNVFSCSVLHEALH |
| | | SHYTQKSLSLSPGK |
| Chain_2- | SEQ ID | EVQLVESGGGLVKPGGSLKLSCAASGYTFTSYVMHWVRQ |
| CD19- | NO: 246 | APGKGLEWIGYINPYNDGTKYNEKFQGRVTISSDKSISTAY |
| OG_VH_(G4S | | MELSSLRSEDTAMYYCARGTYYYGTRVFDYWGQGTLVT |
| )2_[CD3]_H1. | | VSSASTKGPSVFPLAPSSKSTSGGTAALGCLVKDYFPEPVT |
| 89_L1.47_scF | | VSWNSGALTSGVHTFPAVLQSSGLYSLSSVVTVPSSSLGT |
| v(GKPGS)4_F | | QTYICNVNHKPSNTKVDKKVEPKSCGGGGSGGGGSEVQL |
| c(222)_IgG1 | | VESGGGLVQPGGSLRLSCAASGFTFSTYAMNWVRQAPGK |
| | | GLEWVGRIRSKYNNYATYYADSVKGRFTISRDDSKNTLY |
| | | LQMNSLRAEDTAVYYCVRHGNFGDEYVSWFAYWGQGTL |
| | | VTVSSGKPGSGKPGSGKPGSGKPGSQAVVTQEPSLTVSPG |
| | | GTVTLTCGSSTGAVTTSNYANWVQQKPGKSPRGLIGGTN |
| | | KRAPGVPARFSGSLLGGKAALTISGAQPEDEADYYCALW |
| | | YSNHWVFGGGTKLTVLGGGGSGGGGSKTHTCPPCPAPPV |
| | | AGPSVFLFPPKPKDTLMISRTPEVTCVVVDVKHEDPEVKF |
| | | NWYVDGVEVHNAKTKPREEQYNSTYRVVSVLTVLHQDW |
| | | LNGKEYKCKVSNKALPAPIEKTISKAKGQPREPQVYTLPPS |
| | | REQMTKNQVKLTCLVKGFYPSDIAVEWESNGQPENNYKT |
| | | TPPVLDSDGSFFLYSKLTVDKSRWQQGNVFSCSVMHEAL |
| | | HNHYTQKSLSLSPGK |
| Chain_2- | SEQ ID | EVQLVESGGGLVKPGGSLKLSCAASGYTFTSYVMHWVRQ |
| CD19- | NO: 247 | APGKGLEWIGYINPYNDGTKYNEKFQGRVTISSDKSISTAY |
| OG_VH_(G4S | | MELSSLRSEDTAMYYCARGTYYYGTRVFDYWGQGTLVT |
| )2_[CD3]_H1. | | VSSASTKGPSVFPLAPSSKSTSGGTAALGCLVKDYFPEPVT |
| 33_L1.47_scFv | | VSWNSGALTSGVHTFPAVLQSSGLYSLSSVVTVPSSSLGT |
| (GKPGS)4_ | | QTYICNVNHKPSNTKVDKKVEPKSCGGGGSGGGGSEVQL |
| Fc(222)_IgG1 | | VESGGGLVQPGGSLRLSCAASGFTFSTYAMNWVRQAPGK |
| | | GLEWVGRIRSKYNNYATYYADSVKGRFTISRDDSKNTLY |
| | | LQMNSLRAEDTAVYYCVRHGNFGDSYVSWFDYWGQGTL |
| | | VTVSSGKPGSGKPGSGKPGSGKPGSQAVVTQEPSLTVSPG |
| | | GTVTLTCGSSTGAVTTSNYANWVQQKPGKSPRGLIGGTN |
| | | KRAPGVPARFSGSLLGGKAALTISGAQPEDEADYYCALW |
| | | YSNHWVFGGGTKLTVLGGGGSGGGGSKTHTCPPCPAPPV |
| | | AGPSVFLFPPKPKDTLMISRTPEVTCVVVDVKHEDPEVKF |
| | | NWYVDGVEVHNAKTKPREEQYNSTYRVVSVLTVLHQDW |
| | | LNGKEYKCKVSNKALPAPIEKTISKAKGQPREPQVYTLPPS |
| | | REQMTKNQVKLTCLVKGFYPSDIAVEWESNGQPENNYKT |
| | | TPPVLDSDGSFFLYSKLTVDKSRWQQGNVFSCSVMHEAL |
| | | HNHYTQKSLSLSPGK |
| Chain_2- | SEQ ID | EVQLVESGGGLVKPGGSLKLSCAASGYTFTSYVMHWVRQ |
| CD19- | NO: 248 | APGKGLEWIGYINPYNDGTKYNEKFQGRVTISSDKSISTAY |
| OG_VH_(G4S | | MELSSLRSEDTAMYYCARGTYYYGTRVFDYWGQGTLVT |
| )2_[CD3]_H1. | | VSSASTKGPSVFPLAPSSKSTSGGTAALGCLVKDYFPEPVT |
| 32_L1.47_scF | | VSWNSGALTSGVHTFPAVLQSSGLYSLSSVVTVPSSSLGT |
| v(GKPGS)4_F | | QTYICNVNHKPSNTKVDKKVEPKSCGGGGSGGGGSEVQL |
| c(222)_IgG1 | | VESGGGLVQPGGSLRLSCAASGFTFSTYAMNWVRQAPGK |
| | | GLEWVGRIRSKANNYATYYADSVKGRFTISRDDSKNTLY |
| | | LQMNSLRAEDTAVYYCVRHGNFGDSYVSWFAYWGQGTL |
| | | VTVSSGKPGSGKPGSGKPGSGKPGSQAVVTQEPSLTVSPG |
| | | GTVTLTCGSSTGAVTTSNYANWVQQKPGKSPRGLIGGTN |
| | | KRAPGVPARFSGSLLGGKAALTISGAQPEDEADYYCALW |
| | | YSNHWVFGGGTKLTVLGGGGSGGGGSKTHTCPPCPAPPV |
| | | AGPSVFLFPPKPKDTLMISRTPEVTCVVVDVKHEDPEVKF |
| | | NWYVDGVEVHNAKTKPREEQYNSTYRVVSVLTVLHQDW |
| | | LNGKEYKCKVSNKALPAPIEKTISKAKGQPREPQVYTLPPS |
| | | REQMTKNQVKLTCLVKGFYPSDIAVEWESNGQPENNYKT |
| | | TPPVLDSDGSFFLYSKLTVDKSRWQQGNVFSCSVMHEAL |
| | | HNHYTQKSLSLSPGK |
| Chain_2- | SEQ ID | EVQLVESGGGLVKPGGSLKLSCAASGYTFTSYVMHWVRQ |
| CD19- | NO: 249 | APGKGLEWIGYINPYNDGTKYNEKFQGRVTISSDKSISTAY |
| OG_VH_(G4S | | MELSSLRSEDTAMYYCARGTYYYGTRVFDYWGQGTLVT |
| )2_[CD3]_H1. | | VSSASTKGPSVFPLAPSSKSTSGGTAALGCLVKDYFPEPVT |
| 30_L1.47_scF | | VSWNSGALTSGVHTFPAVLQSSGLYSLSSVVTVPSSSLGT |
| v(GKPGS)4_F | | QTYICNVNHKPSNTKVDKKVEPKSCGGGGSGGGGSEVQL |
| c(222)_IgG1 | | VESGGGLVQPGGSLRLSCAASGFTFSTYAMNWVRQAPGK |
| | | GLEWVGRIRSKYNNYATYYADSVKGRFTISRDDSKNTLY |
| | | LQMNSLRAEDTAVYYCVRHGNFGDSYVSWFAYWGQGTL |
| | | VTVSSGKPGSGKPGSGKPGSGKPGSQAVVTQEPSLTVSPG |
| | | GTVTLTCGSSTGAVTTSNYANWVQQKPGKSPRGLIGGTN |
| | | KRAPGVPARFSGSLLGGKAALTISGAQPEDEADYYCALW |
| | | YSNHWVFGGGTKLTVLGGGGSGGGGSKTHTCPPCPAPPV |
| | | AGPSVFLFPPKPKDTLMISRTPEVTCVVVDVKHEDPEVKF |
| | | NWYVDGVEVHNAKTKPREEQYNSTYRVVSVLTVLHQDW |
| | | LNGKEYKCKVSNKALPAPIEKTISKAKGQPREPQVYTLPPS |
| | | REQMTKNQVKLTCLVKGFYPSDIAVEWESNGQPENNYKT |
| | | TPPVLDSDGSFFLYSKLTVDKSRWQQGNVFSCSVMHEAL |
| | | HNHYTQKSLSLSPGK |

1. A bi-specific anti-CD19 and anti-CD3 antigen binding molecule comprising:
an anti-CD19 antigen binding domain comprising
a first anti-CD19 binding subunit comprising CDR amino acid sequences of SEQ ID NOs: 1, 2, and 3, and
a second anti-CD19 binding subunit comprising CDR amino acid sequences of SEQ ID NOs: 4, 5, and 6; and
an anti-CD3 antigen binding domain comprising
a first anti-CD3 binding subunit comprising the CDR amino acid sequences of SEQ ID NO: 9, SEQ ID NO: 10 or 11, and SEQ ID NO: 12, 13, 14, 15, or 16, and
an anti-CD3 second binding subunit comprising the CDR amino acid sequences of SEQ ID NOs: 17, 18, and 19.

2.-3. (canceled)

4. A bi-specific anti-CD19 and anti-CD3 antigen binding molecule, wherein the anti-CD19 antigen binding domain comprises:
a first anti-CD19 binding subunit comprising at least 95% sequence identity to the amino acid sequence of SEQ ID NO: 7; and
a second anti-CD19 binding subunit comprising at least 95% sequence identity to the amino acid sequence of SEQ ID NO: 8; and
a light chain variable region comprising at least 95% sequence identity to an amino acid sequence of SEQ ID NO: 180; and
a heavy chain variable region comprising at least 95% sequence identity to an amino acid sequence selected from the group consisting of SEQ ID NO: 179, 181, 182, 183, 184, 185, 186, 187, 188, and 189.

5. The bi-specific anti-CD19 and anti-CD3 antigen binding molecule of claim 4, wherein the anti-CD19 antigen binding domain comprises:
a first anti-CD19 binding subunit comprising the amino acid sequence of SEQ ID NO: 7; and
a second anti-CD19 binding subunit comprising the amino acid sequence of SEQ ID NO: 8.

6. (canceled)

7. The bi-specific anti-CD19 and anti-CD3 antigen binding molecule of claim 4, wherein the anti-CD19 antigen binding domain comprises:
the light chain variable region comprising an amino acid sequence of SEQ ID NO: 180; and
the heavy chain variable region comprising an amino acid sequence selected from the group consisting of SEQ ID NO: 179, 181, 182, 183, 184, 185, 186, 187, 188, and 189.

8.-9. (canceled)

10. The bi-specific anti-CD19 and anti-CD3 antigen binding molecule of claim 1, wherein the bi-specific antibody is a 1+1 Fab-scFv-Fc, 2+1 Fab₂-scFv-Fc, 1+1 Common Light Chain, 2+1 Common Light Chain, 2+1 mAb-scFv, 2+1 stackFab₂-scFv-Fc, Dual scFv, One-arm scFv-mAb, scFv-mAb, Bispecific mAb, One-arm central-scFv, mAb-Fv, central-Fv, or Trident.

11. (canceled)

12. The bi-specific anti-CD19 and anti-CD3 antigen binding molecule of claim 9, comprising:
a first monomer comprising, from N- to C-terminus, a VH-CH1-first domain linker-scFv-second domain linker-CH2-CH3, wherein
the scFv comprises an antigen binding domain that binds CD3; and
the CH2-CH3 is first variant Fc domain;
a second monomer comprising a VH-CH1-hinge-CH2-CH3, wherein the CH2-CH3 is a second variant Fc domain;
a first light chain that together with the first monomer forms a Fab domain that comprises an antigen binding domain that binds CD19; and
a second light chain that together with the second monomer forms a Fab domain that comprises an antigen binding domain that binds CD19.

13.-36. (canceled)

37. A bi-specific anti-CD19 and anti-CD3 antigen binding molecule, wherein the binding molecule is a 1+1 Fab-scFv-Fc and comprises an amino acid sequence selected from the group consisting of:
SEQ ID NOs: 210, 211, and 212;
SEQ ID NOs: 213, 214, and 215;
SEQ ID NOs: 213, 216, and 215;
SEQ ID NOs: 213, 217, and 215; and
SEQ ID NOs: 213, 218, and 215.

38. The bi-specific anti-CD19 and anti-CD3 antigen binding molecule of claim 12, wherein the binding molecule is a 2+1 Fab₂-scFv-Fc and comprises an amino acid sequence selected from the group consisting of:
SEQ ID NOs: 210, 219, and 212;
SEQ ID NOs: 210, 220, and 212;
SEQ ID NOs: 210, 221, and 212;
SEQ ID NOs: 210, 222, and 212;
SEQ ID NOs: 210, 223, and 212;
SEQ ID NOs: 210, 224, and 212;
SEQ ID NOs: 210, 225, and 212;
SEQ ID NOs: 210, 226, and 212;
SEQ ID NOs: 210, 227, and 212;
SEQ ID NOs: 210, 228, and 212;
SEQ ID NOs: 210, 229, and 212;
SEQ ID NOs: 210, 230, and 212;
SEQ ID NOs: 210, 231, and 212;
SEQ ID NOs: 232, 233, and 215;
SEQ ID NOs: 232, 234, and 215;
SEQ ID NOs: 232, 235, and 215;
SEQ ID NOs: 232, 236, and 215;
SEQ ID NOs: 232, 237, and 215;
SEQ ID NOs: 232, 238, and 215;
SEQ ID NOs: 232, 239, and 215;
SEQ ID NOs: 232, 240, and 215;
SEQ ID NOs: 232, 241, and 215;
SEQ ID NOs: 232, 242, and 215;
SEQ ID NOs: 232, 243, and 215;
SEQ ID NOs: 232, 244, and 215;
SEQ ID NOs: 232, 245, and 215;
SEQ ID NOs: 213, 246, and 215;
SEQ ID NOs: 213, 247, and 215;
SEQ ID NOs: 213, 248, and 215; and
SEQ ID NOs: 213, 249, and 215.

39. A bi-specific anti-CD19 and anti-CD3 antigen binding molecule comprising:
a means for binding CD19; and
a first anti-CD3 binding subunit comprising the CDR amino acid sequences of SEQ ID NO: 9, SEQ ID NO: 10 or 11, and SEQ ID NO: 12, 13, 14, 15, or 16, and an anti-CD3 second binding subunit comprising the CDR amino acid sequences of SEQ ID NOs: 17, 18, and 19.

40. A bi-specific anti-CD19 and anti-CD3 antigen binding molecule comprising:
a means for binding CD3; and
an anti-CD19 antigen binding domain comprising:
a first binding subunit comprising CDR amino acid sequences of SEQ ID NOs: 1, 2, and 3; and
a second binding subunit comprising CDR amino acid sequences of SEQ ID NOs: 4, 5, and 6.

41. A method of depleting B-cells in a subject, the method comprising administering a bi-specific anti-CD19 and anti-CD3 antigen binding molecule to the subject,
wherein the anti-CD19 antigen binding domain comprises:
a first anti-CD19 binding subunit comprising at least 95% sequence identity to the amino acid sequence of SEQ ID NO: 7; and
a second anti-CD19 binding subunit comprising at least 95% sequence identity to the amino acid sequence of SEQ ID NO: 8; and
a light chain variable region comprising at least 95% sequence identity to an amino acid sequence of SEQ ID NO: 180; and
a heavy chain variable region comprising at least 95% sequence identity to an amino acid sequence selected from the group consisting of SEQ ID NO: 179, 181, 182, 183, 184, 185, 186, 187, 188, and 189.

42.-43. (canceled)

44. A method of treating an autoimmune disorder in a subject, the method comprising administering a bi-specific anti-CD19 and anti-CD3 antigen binding molecule to the subject,
wherein the anti-CD19 antigen binding domain comprises:
a first anti-CD19 binding subunit comprising at least 95% sequence identity to the amino acid sequence of SEQ ID NO: 7; and
a second anti-CD19 binding subunit comprising at least 95% sequence identity to the amino acid sequence of SEQ ID NO: 8; and
a light chain variable region comprising at least 95% sequence identity to an amino acid sequence of SEQ ID NO: 180; and
a heavy chain variable region comprising at least 95% sequence identity to an amino acid sequence selected from the group consisting of SEQ ID NO: 179, 181, 182, 183, 184, 185, 186, 187, 188, and 189.

45. (canceled)

46. A method of treating an inflammatory disease in a subject, the method comprising administering a bi-specific anti-CD19 and anti-CD3 antigen binding molecule to the subject,
wherein the anti-CD19 antigen binding domain comprises:
a first anti-CD19 binding subunit comprising at least 95% sequence identity to the amino acid sequence of SEQ ID NO: 7; and
a second anti-CD19 binding subunit comprising at least 95% sequence identity to the amino acid sequence of SEQ ID NO: 8; and
a light chain variable region comprising at least 95% sequence identity to an amino acid sequence of SEQ ID NO: 180; and
a heavy chain variable region comprising at least 95% sequence identity to an amino acid sequence selected from the group consisting of SEQ ID NO: 179, 181, 182, 183, 184, 185, 186, 187, 188, and 189.

47. A method of treating cancer in a subject, the method comprising administering a bi-specific anti-CD19 and anti-CD3 antigen binding molecule to the subject,
wherein the anti-CD19 antigen binding domain comprises:
a first anti-CD19 binding subunit comprising at least 95% sequence identity to the amino acid sequence of SEQ ID NO: 7; and
a second anti-CD19 binding subunit comprising at least 95% sequence identity to the amino acid sequence of SEQ ID NO: 8; and
a light chain variable region comprising at least 95% sequence identity to an amino acid sequence of SEQ ID NO: 180; and
a heavy chain variable region comprising at least 95% sequence identity to an amino acid sequence selected from the group consisting of SEQ ID NO: 179, 181, 182, 183, 184, 185, 186, 187, 188, and 189.

48. (canceled)

49. An anti-CD3 antigen binding molecule, comprising an antigen binding domain comprising:
a first binding subunit comprising complementarity determining region (CDR) amino acid sequences of SEQ ID NO: 9, SEQ ID NO: 10 or 11, and SEQ ID NO: 12, 13, 14, 15, or 16; and
a second binding subunit comprising the CDR amino acid sequences of SEQ ID NOs: 17, 18, and 19.

50.-57. (canceled)

58. An anti-CD3 antigen binding molecule, comprising:
a first binding subunit and a second binding subunit;
wherein the first binding subunit comprises a framework region having at least 95% identity to an amino acid sequence selected from the group consisting of SEQ ID NO: 28, 29, 30, and 31, and/or
wherein the second binding subunit comprises a framework region having at least 95% identity to an amino acid sequence selected from the group consisting of 32, 33, 34, and 35.

59.-65. (canceled)

66. An anti-CD19 antigen binding molecule, comprising an antigen binding domain comprising:
a first binding subunit comprising CDR amino acid sequences of SEQ ID NOs: 1, 2, and 3; and
a second binding subunit comprising CDR amino acid sequences of SEQ ID NOs: 4, 5, and 6.

67.-71. (canceled)

72. An anti-CD19 antigen binding molecule, comprising:
a first binding subunit and a second binding subunit; and
wherein the first binding subunit comprises a framework region having at least 95% identity to an amino acid sequence selected from the group consisting of SEQ ID NO: 20, 21, 22, and 23, and/or
wherein the second binding subunit comprises a framework region having at least 95% identity to an amino acid sequence selected from the group consisting of 24, 25, 26, and 27.

73.-78. (canceled)

79. A bi-specific anti-CD19 and anti-CD3 antigen binding molecule comprising:
a first anti-CD19 binding subunit comprising:
a framework region 1 (FR1) comprising at least 95% identity to an amino acid sequence of SEQ ID NO: 20;
a framework region 2 (FR2) comprising at least 95% identity to the amino acid sequence of SEQ ID NO: 21;
a framework region 3 (FR3) comprising at least 95% identity to the amino acid sequence of SEQ ID NO: 22; and
a framework region 4 (FR4) comprising at least 95% identity to the amino acid sequence of SEQ ID NO: 23; and
a second anti-CD19 binding subunit comprising:
a framework region 5 (FR5) comprising at least 95% identity to the amino acid sequence of SEQ ID NO: 24;
a framework region 6 (FR6) comprising at least 95% identity to the amino acid sequence of SEQ ID NO: 25;
a framework region 7 (FR7) comprising at least 95% identity to the amino acid sequence of SEQ ID NO: 26; and
a framework region 8 (FR8) comprising at least 95% identity to the amino acid sequence of SEQ ID NO: 27.

80.-86. (canceled)

87. A nucleic acid encoding a first anti-CD19 binding subunit, the first anti-CD19 binding subunit comprising CDR amino acid sequences of SEQ ID NOs: 1, 2, and 3.

88. (canceled)

89. A nucleic acid encoding a second anti-CD19 binding subunit comprising CDR amino acid sequences of SEQ ID NOs: 4, 5, and 6.

90. A nucleic acid encoding a first anti-CD3 binding subunit,
the first binding subunit comprising complementarity determining region (CDR) amino acid sequences of SEQ ID NO: 9, SEQ ID NO: 10 or 11, and SEQ ID NO: 12, 13, 14, 15, or 16.

91. (canceled)

92. A nucleic acid encoding a second anti-CD3 binding subunit, the second binding subunit comprising the CDR amino acid sequences of SEQ ID NOs: 17, 18, and 19.

93.-97. (canceled)

98. A host cell comprising the nucleic acid of claim 87.

The application's sequence listing, which the Patent Office published only in electronic form, follows.

SEQUENCE LISTING (3380 sequences)

SEQ ID NO: 1 - protein, 5 aa, Synthetic construct
SYVMH

SEQ ID NO: 2 - protein, 17 aa, Synthetic construct
YINPYNDGTKYNEKFQG

SEQ ID NO: 3 - protein, 12 aa, Synthetic construct
GTYYYGTRVFDY

SEQ ID NO: 4 - protein, 16 aa, Synthetic construct
RSSKSLQNVNGNTYLY

SEQ ID NO: 5 - protein, 7 aa, Synthetic construct
RASNLNS

SEQ ID NO: 6 - protein, 9 aa, Synthetic construct
MQHLEYPIT

SEQ ID NO: 7 - protein, 121 aa, Synthetic construct
QVQLVQSGAEVKKPGASVKVSCKASGYTFTSYVMHWVRQAPGQGLEWMGYINPYNDGTKYNEKFQGRVTITSDKSTSTAYMELSSLRSEDTAVYYCARGTYYYGTRVFDYWGQGTLVTVSS

SEQ ID NO: 8 - protein, 112 aa, Synthetic construct
DIVMTQSPLSLPVTPGEPASISCRSSKSLQNVNGNTYLYWFLQKPGQSPQLLIYRASNLNSGVPDRFSGSGSGTDFTLKISRVEAEDVGVYYCMQHLEYPITFGQGTKLEIK

SEQ ID NO: 9 - protein, 5 aa, Synthetic construct
TYAMN

SEQ ID NO: 10 - protein, 19 aa, Synthetic construct
RIRSKYNNYATYYADSVKG

SEQ ID NO: 11 - protein, 19 aa, Synthetic construct
RIRSKANNYATYYADSVKG

SEQ ID NO: 12 - protein, 14 aa, Synthetic construct
HTNFGDSYVSWFAY

SEQ ID NO: 13 - protein, 14 aa, Synthetic construct
HTNFGGSYVSWFAY

SEQ ID NO: 14 - protein, 14 aa, Synthetic construct
HENFGDSYVSWFAY

SEQ ID NO: 15 - protein, 14 aa, Synthetic construct
HENFGGSYVSWFAY

SEQ ID NO: 16 - protein, 14 aa, Synthetic construct
HTNFGGEYVSWFAY

SEQ ID NO: 17 - protein, 14 aa, Synthetic construct
GSSTGAVTTSNYAN

SEQ ID NO: 18 - protein, 7 aa, Synthetic construct
GTNKRAP

SEQ ID NO: 19 - protein, 9 aa, Synthetic construct
ALWYSNHWV

SEQ ID NO: 20 - protein, 30 aa, Synthetic construct
QVQLVQSGAEVKKPGASVKVSCKASGYTFT

SEQ ID NO: 21 - protein, 14 aa, Synthetic construct
WVRQAPGQGLEWMG

SEQ ID NO: 22 - protein, 32 aa, Synthetic construct
RVTITSDKSTSTAYMELSSLRSEDTAVYYCAR

SEQ ID NO: 23 - protein, 11 aa, Synthetic construct
WGQGTLVTVSS

SEQ ID NO: 24 - protein, 23 aa, Synthetic construct
DIVMTQSPLSLPVTPGEPASISC

SEQ ID NO: 25 - protein, 15 aa, Synthetic construct
WFLQKPGQSPQLLIY

SEQ ID NO: 26 - protein, 32 aa, Synthetic construct
GVPDRFSGSGSGTDFTLKISRVEAEDVGVYYC

SEQ ID NO: 27 - protein, 10 aa, Synthetic construct
FGQGTKLEIK

SEQ ID NO: 28 - protein, 30 aa, Synthetic construct
EVQLVESGGGLVQPGGSLRLSCAASGFTFS

SEQ ID NO: 29 - protein, 14 aa, Synthetic construct
WVRQAPGKCLEWVG

SEQ ID NO: 30 - protein, 32 aa, Synthetic construct
RFTISRDDSKNTLYLQMNSLRAEDTAVYYCVR

SEQ ID NO: 31 - protein, 11 aa, Synthetic construct
WGQGTLVTVSS

SEQ ID NO: 32 - protein, 22 aa, Synthetic construct
QAVVTQEPSLTVSPGGTVTLTC

SEQ ID NO: 33 - protein, 15 aa, Synthetic construct
WVQQKPGKSPRGLIG

SEQ ID NO: 34 - protein, 32 aa, Synthetic construct
GVPARFSGSLLGGKAALTISGAQPEDEADYYC

SEQ ID NO: 35 - protein, 10 aa, Synthetic construct
FGCGTKLTVL

SEQ ID NO: 36 - protein, 20 aa, Synthetic construct
GKPGSGKPGSGKPGSGKPGS

SEQ ID NO: 37 - protein, 207 aa, Synthetic construct
MQSGTHWRVLGLCLLSVGVWGQDGNEEMGGITQTPYKVSISGTTVILTCPQYPGSEILWQHNDKNIGGDEDDKNIGSDEDHLSLKEFSELEQSGYYVCYPRGSKPEDANFYLYLRARVCENCMEMDVMSVATIVIVDICITGGLLLLVYYWSKNRKAKAKPVTRGAGAGGRQRGQNKERPPPVPNPDYEPIRKGQRDLYSGLNQRRI

SEQ ID NO: 38 - protein, 104 aa, Synthetic construct
DGNEEMGGITQTPYKVSISGTTVILTCPQYPGSEILWQHNDKNIGGDEDDKNIGSDEDHLSLKEFSELEQSGYYVCYPRGSKPEDANFYLYLRARVCENCMEMD

SEQ ID NO: 39 - protein, 189 aa, Synthetic construct
MRWNTFWGILCLSLLAVGTCQDDAENIEYKVSISGTSVELTCPLDSDENLKWEKNGQELPQKHDKHLVLQDFSEVEDSGYYVCYTPASNKNTYLYLKARVCEYCVEVDLTAVAIIIIVDICITLGLLMVIYYWSKNRKAKAKPVTRGTGAGSRPRGQNKERPPPVPNPDYEPIRKGQRDLYSGLNQRAV

SEQ ID NO: 40 - protein, 86 aa, Synthetic construct
DAENIEYKVSISGTSVELTCPLDSDENLKWEKNGQELPQKHDKHLVLQDFSEVEDSGYYVCYTPASNKNTYLYLKARVCEYCVEVD

SEQ ID NO: 41 - protein, 198 aa, Synthetic construct
MQSGTRWRVLGLCLLSIGVWGQDGNEEMGSITQTPYQVSISGTTVILTCSQHLGSEAQWQHNGKNKEDSGDRLFLPEFSEMEQSGYYVCYPRGSNPEDASHHLYLKARVCENCMEMDVMAVATIVIVDICITLGLLLLVYYWSKNRKAKAKPVTRGAGAGGRQRGQNKERPPPVPNPDYEPIRKGQQDLYSGLNQRRI

SEQ ID NO: 42 - protein, 96 aa, Synthetic construct
QDGNEEMGSITQTPYQVSISGTTVILTCSQHLGSEAQWQHNGKNKEDSGDRLFLPEFSEMEQSGYYVCYPRGSNPEDASHHLYLKARVCENCMEMD

SEQ ID NO: 43 - protein, 556 aa, Synthetic construct [sequence omitted]

SEQ ID NO: 44 - protein, 272 aa, Synthetic construct
PEEPLVVKVEEGDNAVLQCLKGTSDGPTQQLTWSRESPLKPFLKLSLGLPGLGIHMRPLAIWLFIFNVSQQMGGFYLCQPGPPSEKAWQPGWTVNVEGSGELFRWNVSDLGGLGCGLKNRSSEGPSSPSGKLMSPKLYVWAKDRPEIWEGEPPCLPPRDSLNQSLSQDLTMAPGSTLWLSCGVPPDSVSRGPLSWTHVHPKGPKSLLSLELKDDRPARDMWVMETGLLLPRATAQDAGKYYCHRGNLTMSFHLEITARPVLWHWLLRTGGWK

SEQ ID NO: 45 - protein, 547 aa, Synthetic construct
MPSPLPVSFLLFLTLVGGRPQKSLLVEVEEGGNVVLPCLPDSSPVSSEKLAWYRGNQSTPFLELSPGSPGLGLHVGSLGILLVIVNVSDHMGGFYLCQKRPPFKDIWQPAWTVNVEDSGEMFRWNASDVRDLDCDLRNRSSGSHRSTSGSQLYVWAKDHPKVWGTKPVCAPRGSSLNQSLINQDLTVAPGSTLWLSCGVPPVPVAKGSISWTHVHPRRPNVSLLSLSLGGEHPVREMWVWGSLLLLPQATALDEGTYYCLRGNLTIERHVKVIARSAVWLWLLRTGGWIVPVVTLVYVIFCMVSLVAFLYCQRAFILRRKRKRMTDPARRFFKVTPPSGNGTQNQYGNVLSLPTSTSGQAHAQRWAAGLGSVPGSYGNPRIQVQDTGAQSHETGLEEEGEAYEEPDSEEGSEFYENDSNLGQDQVSQDGSGYENPEDEPMGPEEEDSFSNAESYENADEELAQPVGRMMDFLSPHGSAWDPSREASSLGSQSYEDMRGILYAAPQLHSIQSGPSHEEDADSYENMDKSDDLEPAWEGEGHMGTWGTT

SEQ ID NO: 46 - protein, 269 aa, Synthetic construct
RPQKSLLVEVEEGGNVVLPCLPDSSPVSSEKLAWYRGNQSTPFLELSPGSPGLGLHVGSLGILLVIVNVSDHMGGFYLCQKRPPFKDIWQPAWTVNVEDSGEMFRWNASDVRDLDCDLRNRSSGSHRSTSGSQLYVWAKDHPKVWGTKPVCAPRGSSLNQSLINQDLTVAPGSTLWLSCGVPPVPVAKGSISWTHVHPRRPNVSLLSLSLGGEHPVREMWVWGSLLLLPQATALDEGTYYCLRGNLTIERHVKVIARSAVWLWLLRTGG

SEQ ID NO: 47 - protein, 557 aa, Synthetic construct
MPPPCLLFFLLFLTPMEVRPQEPLVVKVEEGDNAVLQCLEGTSDGPTQQLVWCRDSPFEPFLNLSLGLPGMGIRMGPLGIWLLIFNVSNQTGGFYLCQPGLPSEKAWQPGWTVSVEGSGELFRWNVSDLGGLGCGLKNRSSEGPSSPSGKLNSSQLYVWAKDRPEMWEGEPVCGPPRDSLNQSLSQDLTMAPGSTLWLSCGVPPDSVSRGPLSWTHVRPKGPKSSLLSLELKDDRPDRDMWVVDTGLLLTRATAQDAGKYYCHRGNWTKSFYLEITARPALWHWLLRIGGWKVPAVTLTYLIFCLCSLVGILQLQRALVLRRKRKRMTDPTRRFFKVTPPPGSGPQNQYGNVLSLPTPTSGLGRAQRWAAGLGGTAPSYGNPSSDVQVDGAVGSRSPPGAGPEEEEGEGYEEPDSEEGSEFYENDSNFGQDQLSQDGSGYENPEDEPLGPEDEDSFSNAESYENEDEELTQPVARTMDFLSPHGSAWDPSREATSLGSQSYEDMRGLLYAAPQLRTIRGQPGPNHEEDADSYENMDNPDGPDPAWGGGGRMGTWSAR

SEQ ID NO: 48 - protein, 273 aa, Synthetic construct
PQEPLVVKVEEGDNAVLQCLEGTSDGPTQQLVWCRDSPFEPFLNLSLGLPGMGIRMGPLGIWLLIFNVSNQTGGFYLCQPGLPSEKAWQPGWTVSVEGSGELFRWNVSDLGGLGCGLKNRSSEGPSSPSGKLNSSQLYVWAKDRPEMWEGEPVCGPPRDSLNQSLSQDLTMAPGSTLWLSCGVPPDSVSRGPLSWTHVRPKGPKSSLLSLELKDDRPDRDMWVVDTGLLLTRATAQDAGKYYCHRGNWTKSFYLEITARPALWHWLLRIGGWK

SEQ ID NO: 49 - protein, 15 aa, Synthetic construct
GGGGSGGGGSGGGGS

SEQ ID NO: 50 - protein, 18 aa, Synthetic construct
GSTSGSGKPGSGEGSTKG

SEQ ID NO: 51 - protein, 14 aa, Synthetic construct
IRPRAIGGSKPRVA

SEQ ID NO: 52 - protein, 15 aa, Synthetic construct
GKGGSGKGGSGKGGS

SEQ ID NO: 53 - protein, 15 aa, Synthetic construct
GGKGSGGKGSGGKGS

SEQ ID NO: 54 - protein, 15 aa, Synthetic construct
GGGKSGGGKSGGGKS

SEQ ID NO: 55 - protein, 15 aa, Synthetic construct
GKGKSGKGKSGKGKS

SEQ ID NO: 56 - protein, 15 aa, Synthetic construct
GGGKSGGKGSGKGGS

SEQ ID NO: 57 - protein, 15 aa, Synthetic construct
GKPGSGKPGSGKPGS

SEQ ID NO: 58 - protein, 20 aa, Synthetic construct
GKPGSGKPGSGKPGSGKPGS

SEQ ID NO: 59 - protein, 20 aa, Synthetic construct
GKGKSGKGKSGKGKSGKGKS

SEQ ID NO: 60 - protein, 20 aa, Synthetic construct
GGGGSGGGGSGGGGSGGGGS

SEQ ID NO: 61 - protein, 14 aa, Synthetic construct
STAGDTHLGGEDFD

SEQ ID NO: 62 - protein, 15 aa, Synthetic construct
GEGGSGEGGSGEGGS

SEQ ID NO: 63 - protein, 15 aa, Synthetic construct
GEGGSGEGGSGEGGS

SEQ ID NO: 64 - protein, 15 aa, Synthetic construct
GGGESGGGESGGGES

SEQ ID NO: 65 - protein, 15 aa, Synthetic construct
GEGESGEGESGEGES

SEQ ID NO: 66 - protein, 15 aa, Synthetic construct
GGGESGGEGSGEGGS

SEQ ID NO: 67 - protein, 20 aa, Synthetic construct
GEGESGEGESGEGESGEGES

SEQ ID NO: 68 - protein, 15 aa, Synthetic construct
GGGGSGGGGSGGGGS

SEQ ID NO: 69 - protein, 20 aa, Synthetic construct
GGGGSGGGGSGGGGSGGGGS

SEQ ID NO: 70 - protein, 18 aa, Synthetic construct
GSTSGSGKPGSGEGSTKG

SEQ ID NO: 71 - protein, 19 aa, Synthetic construct
PRGASKSGSASQTGSAPGS

SEQ ID NO: 72 - protein, 19 aa, Synthetic construct
GTAAAGAGAAGGAAAGAAG

SEQ ID NO: 73 - protein, 19 aa, Synthetic construct
GTSGSSGSGSGGSGSGGGG

SEQ ID NO: 74 - protein, 20 aa, Synthetic construct
GKPGSGKPGSGKPGSGKPGS

SEQ ID NO: 75 - protein, 20 aa, Synthetic construct
GGSEGKSSGSGSESKSTGGS

SEQ ID NO: 76 - protein, 18 aa, Synthetic construct
GGGSGGSGGCPPCGGSGG

SEQ ID NO: 77 - protein, 5 aa, Synthetic construct
GGGGS

SEQ ID NO: 78 - protein, 10 aa, Synthetic construct
GGGGSGGGGS

SEQ ID NO: 79 - protein, 15 aa, Synthetic construct
GGGGSGGGGSGGGGS

SEQ ID NO: 80 - protein, 20 aa, Synthetic construct
GGGGSGGGGSGGGGSGGGGS

SEQ ID NO: 81 - protein, 25 aa, Synthetic construct
GGGGSGGGGSGGGGSGGGGSGGGGS

SEQ ID NO: 82 - protein, 30 aa, Synthetic construct
GGGGSGGGGSGGGGSGGGGSGGGGSGGGGS

SEQ ID NO: 83 - protein, 35 aa, Synthetic construct
GGGGSGGGGSGGGGSGGGGSGGGGSGGGGSGGGGS

SEQ ID NO: 84 - protein, 5 aa, Synthetic construct
GGGGA

SEQ ID NO: 85 - protein, 10 aa, Synthetic construct
GGGGAGGGGA

SEQ ID NO: 86 - protein, 15 aa, Synthetic construct
GGGGAGGGGAGGGGA

SEQ ID NO: 87 - protein, 20 aa, Synthetic construct
GGGGAGGGGAGGGGAGGGGA

SEQ ID NO: 88 - protein, 24 aa, Synthetic construct
GGGAGGGGAGGGGAGGGGAGGGGA

SEQ ID NO: 89 - protein, 30 aa, Synthetic construct
GGGGAGGGGAGGGGAGGGGAGGGGAGGGGA

SEQ ID NO: 90 - protein, 35 aa, Synthetic construct
GGGGAGGGGAGGGGAGGGGAGGGGAGGGGAGGGGA

SEQ ID NO: 91 - protein, 30 aa, Synthetic construct
DPALVHQRPAPPGGGGSGGGGSGGGGSGGG

SEQ ID NO: 92 - protein, 5 aa, Synthetic construct
GKPGS

SEQ ID NO: 93 - protein, 25 aa, Synthetic construct
GKPGSGKPGSGKPGSGKPGSGKPGS

SEQ ID NO: 94 - protein, 30 aa, Synthetic construct
GKPGSGKPGSGKPGSGKPGSGKPGSGKPGS

SEQ ID NO: 95 - protein, 5 aa, Synthetic construct
GGGES

SEQ ID NO: 96 - protein, 15 aa, Synthetic construct
EPKSCDKTHTCPPCP

SEQ ID NO: 97 - protein, 9 aa, Synthetic construct
KTHTCPPCP

SEQ ID NO: 98 - protein, 15 aa, Synthetic construct
EPKSSDKTHTCPPCP

SEQ ID NO: 99 - protein, 19 aa, Synthetic construct
GGGGSGGGGSKTHTCPPCP

SEQ ID NO: 100 - protein, 19 aa, Synthetic construct
GKPGSGKPGSKTHTCPPCP

SEQ ID NO: 101 - protein, 14 aa, Synthetic construct
GKPGSKTHTCPPCP

SEQ ID NO: 102 - protein, 5 aa, Synthetic construct
EPKSC

SEQ ID NO: 103 - protein, 15 aa, Synthetic construct
EPKSCGGGGSGGGGS

SEQ ID NO: 104 - protein, 15 aa, Synthetic construct
EPKSCGKPGSGKPGS

SEQ ID NO: 105 - protein, 10 aa, Synthetic construct
EPKSCGKPGS

SEQ ID NO: 106 - protein, 216 aa, Synthetic construct
APPVAGPSVFLFPPKPKDTLMISRTPEVTCVVVDVKHEDPEVKFNWYVDGVEVHNAKTKPREEEYNSTYRVVSVLTVLHQDWLNGKEYKCKVSNKALPAPIEKTISKAKGQPREPQVYTLPPSREEMTKNQVSLTCDVSGFYPSDIAVEWESDGQPENNYKTTPPVLDSDGSFFLYSKLTVDKSRWEQGDVFSCSVMHEALHNHYTQKSLSLSPGK

SEQ ID NO: 107 - protein, 216 aa, Synthetic construct
APPVAGPSVFLFPPKPKDTLMISRTPEVTCVVVDVKHEDPEVKFNWYVDGVEVHNAKTKPREEQYNSTYRVVSVLTVLHQDWLNGKEYKCKVSNKALPAPIEKTISKAKGQPREPQVYTLPPSREQMTKNQVKLTCLVKGFYPSDIAVEWESNGQPENNYKTTPPVLDSDGSFFLYSKLTVDKSRWQQGNVFSCSVMHEALHNHYTQKSLSLSPGK

SEQ ID NO: 108 - protein, 216 aa, Synthetic construct; identical to SEQ ID NO: 106

SEQ ID NO: 109 - protein, 216 aa, Synthetic construct
APPVAGPSVFLFPPKPKDTLMISRTPEVTCVVVDVKHEDPEVKFNWYVDGVEVHNAKTKPREEQYNSTYRVVSVLTVLHQDWLNGKEYKCKVSNKALPAPIEKTISKAKGQPREPQVYTLPPSREEMTKNQVKLTCLVKGFYPSDIAVEWESNGQPENNYKTTPPVLDSDGSFFLYSKLTVDKSRWQQGNVFSCSVMHEALHNHYTQKSLSLSPGK

SEQ ID NO: 110 - protein, 216 aa, Synthetic construct
APPVAGPSVFLFPPKPKDTLMISRTPEVTCVVVDVKHEDPEVKFNWYVDGVEVHNAKTKPREEEYNSTYRVVSVLTVLHQDWLNGKEYKCKVSNKALPAPIEKTISKAKGQPREPQVYTLPPSREEMTKNQVSLTCEVSGFYPSDIAVEWESDGQPENNYKTTPPVLDSDGSFFLYSKLTVDKSRWEQGDVFSCSVMHEALHNHYTQKSLSLSPGK

SEQ ID NO: 111 - protein, 216 aa, Synthetic construct; identical to SEQ ID NO: 109

SEQ ID NO: 112 - protein, 216 aa, Synthetic construct
APPVAGPSVFLFPPKPKDTLMISRTPEVTCVVVDVKHEDPEVKFNWYVDGVEVHNAKTKPREEEYNSTYRVVSVLTVLHQDWLNGKEYKCKVSNKALPAPIEKTISKAKGQPREPQVYTLPPSREEMTENEVSLTCLVKGFYPSDIAVEWESDGQPENNYKTTPPVLDSDGSFFLYSKLEVDKSRWEQGDVFSCSVMHEALHNHYTQKSLSLSPGK

SEQ ID NO: 113 - protein, 216 aa, Synthetic construct
APPVAGPSVFLFPPKPKDTLMISRTPEVTCVVVDVKHEDPEVKFNWYVDGVEVHNAKTKPREEQYNSTYRVVSVLTVLHQDWLNGKEYKCKVSNKALPAPIEKTISKAKGQPREPQVYTLPPSREEMTKNQVSLTCLVKGFYPSDIAVEWESNGQPENNYKTTPPVLDSKGSFFLYSKLTVDKSRWQQGNVFSCSVMHEALHNHYTQKSLSLSPGK

SEQ ID NO: 114 - protein, 216 aa, Synthetic construct
APPVAGPSVFLFPPKPKDTLMISRTPEVTCVVVDVKHEDPEVKFNWYVDGVEVHNAKTKPREEEYNSTYRVVSVLTVLHQDWLNGKEYKCKVSNKALPAPIEKTISKAKGQPREPQVYTLPPSRDELTKNQVSLTCDVSGFYPSDIAVEWESDGQPENNYKTTPPVLDSDGSFFLYSKLTVDKSRWEQGDVFSCSVMHEALHNHYTQKSLSLSPGK

SEQ ID NO: 115 - protein, 216 aa, Synthetic construct
APPVAGPSVFLFPPKPKDTLMISRTPEVTCVVVDVKHEDPEVKFNWYVDGVEVHNAKTKPREEQYNSTYRVVSVLTVLHQDWLNGKEYKCKVSNKALPAPIEKTISKAKGQPREPQVYTLPPSRDQLTKNQVKLTCLVKGFYPSDIAVEWESNGQPENNYKTTPPVLDSDGSFFLYSKLTVDKSRWQQGNVFSCSVMHEALHNHYTQKSLSLSPGK

SEQ ID NO: 116 - protein, 216 aa, Synthetic construct
APPVAGPSVFLFPPKPKDTLMISRTPEVTCVVVDVKHEDPEVKFNWYVDGVEVHNAKTKPREEEYASTYRVVSVLTVLHQDWLNGKEYKCKVSNKALPAPIEKTISKAKGQPREPQVYTLPPSREEMTKNQVSLTCDVSGFYPSDIAVEWESDGQPENNYKTTPPVLDSDGSFFLYSKLTVDKSRWEQGDVFSCSVMHEALHNHYTQKSLSLSPGK

SEQ ID NO: 117 - protein, 216 aa, Synthetic construct
APPVAGPSVFLFPPKPKDTLMISRTPEVTCVVVDVKHEDPEVKFNWYVDGVEVHNAKTKPREEQYASTYRVVSVLTVLHQDWLNGKEYKCKVSNKALPAPIEKTISKAKGQPREPQVYTLPPSREQMTKNQVKLTCLVKGFYPSDIAVEWESNGQPENNYKTTPPVLDSDGSFFLYSKLTVDKSRWQQGNVFSCSVMHEALHNHYTQKSLSLSPGK

SEQ ID NO: 118 - protein, 216 aa, Synthetic construct
APPVAGPSVFLFPPKPKDTLMISRTPEVTCVVVDVKHEDPEVKFNWYVDGVEVHNAKTKPREEEYSSTYRVVSVLTVLHQDWLNGKEYKCKVSNKALPAPIEKTISKAKGQPREPQVYTLPPSREEMTKNQVSLTCDVSGFYPSDIAVEWESDGQPENNYKTTPPVLDSDGSFFLYSKLTVDKSRWEQGDVFSCSVMHEALHNHYTQKSLSLSPGK

SEQ ID NO: 119 - protein, 216 aa, Synthetic construct
APPVAGPSVFLFPPKPKDTLMISRTPEVTCVVVDVKHEDPEVKFNWYVDGVEVHNAKTKPREEQYSSTYRVVSVLTVLHQDWLNGKEYKCKVSNKALPAPIEKTISKAKGQPREPQVYTLPPSREQMTKNQVKLTCLVKGFYPSDIAVEWESNGQPENNYKTTPPVLDSDGSFFLYSKLTVDKSRWQQGNVFSCSVMHEALHNHYTQKSLSLSPGK

SEQ ID NO: 120 - protein, 217 aa, Synthetic construct
APEFLGGPSVFLFPPKPKDTLMISRTPEVTCVVVDVSQEDPEVQFNWYVDGVEVHNAKTKPREEEFNSTYRVVSVLTVLHQDWLNGKEYKCKVSNKGLPSSIEKTISKAKGQPREPQVYTLPPSQEEMTKNQVSLTCDVSGFYPSDIAVEWESDGQPENNYKTTPPVLDSDGSFFLYSRLTVDKSRWEEGDVFSCSVMHEALHNHYTQKSLSLSLGK

SEQ ID NO: 121 - protein, 217 aa, Synthetic construct
APEFLGGPSVFLFPPKPKDTLMISRTPEVTCVVVDVSQEDPEVQFNWYVDGVEVHNAKTKPREEQFNSTYRVVSVLTVLHQDWLNGKEYKCKVSNKGLPSSIEKTISKAKGQPREPQVYTLPPSQEQMTKNQVKLTCLVKGFYPSDIAVEWESNGQPENNYKTTPPVLDSDGSFFLYSRLTVDKSRWQEGNVFSCSVMHEALHNHYTQKSLSLSLGK

SEQ ID NO: 122 - protein, 216 aa, Synthetic construct
APPVAGPSVFLFPPKPKDTLMISRTPEVTCVVVDVSHEDPEVQFNWYVDGVEVHNAKTKPREEEFNSTFRVVSVLTVVHQDWLNGKEYKCKVSNKGLPAPIEKTISKTKGQPREPQVYTLPPSREEMTKNQVSLTCDVSGFYPSDIAVEWESDGQPENNYKTTPPMLDSDGSFFLYSKLTVDKSRWEQGDVFSCSVMHEALHNHYTQKSLSLSPGK

SEQ ID NO: 123 - protein, 216 aa, Synthetic construct
APPVAGPSVFLFPPKPKDTLMISRTPEVTCVVVDVSHEDPEVQFNWYVDGVEVHNAKTKPREEQFNSTFRVVSVLTVVHQDWLNGKEYKCKVSNKGLPAPIEKTISKTKGQPREPQVYTLPPSREQMTKNQVKLTCLVKGFYPSDIAVEWESNGQPENNYKTTPPMLDSDGSFFLYSKLTVDKSRWQQGNVFSCSVMHEALHNHYTQKSLSLSPGK

SEQ ID NO: 124 - protein, 216 aa, Synthetic construct
APPVAGPSVFLFPPKPKDTLMISRTPEVTCVVVDVKHEDPEVQFNWYVDGVEVHNAKTKPREEEFNSTFRVVSVLTVVHQDWLNGKEYKCKVSNKGLPAPIEKTISKTKGQPREPQVYTLPPSREEMTKNQVSLTCDVSGFYPSDIAVEWESDGQPENNYKTTPPMLDSDGSFFLYSKLTVDKSRWEQGDVFSCSVMHEALHNHYTQKSLSLSPGK

SEQ ID NO: 125 - protein, 216 aa, Synthetic construct
APPVAGPSVFLFPPKPKDTLMISRTPEVTCVVVDVKHEDPEVQFNWYVDGVEVHNAKTKPREEQFNSTFRVVSVLTVVHQDWLNGKEYKCKVSNKGLPAPIEKTISKTKGQPREPQVYTLPPSREQMTKNQVKLTCLVKGFYPSDIAVEWESNGQPENNYKTTPPMLDSDGSFFLYSKLTVDKSRWQQGNVFSCSVMHEALHNHYTQKSLSLSPGK

SEQ ID NO: 126 - protein, 216 aa, Synthetic construct
APPVAGPSVFLFPPKPKDTLMISRTPEVTCVVVDVKHEDPEVKFNWYVDGVEVHNAKTKPREEEYNSTYRVVSVLTVLHQDWLNGKEYKCKVSNKALPAPIEKTISKAKGQPREPQVYTLPPSREEMTKNQVSLTCDVSGFYPSDIAVEWESDGQPENNYKTTPPVLDSDGSFFLYSKLTVDKSRWEQGDVFSCSVLHEALHSHYTQKSLSLSPGK

SEQ ID NO: 127 - protein, 216 aa, Synthetic construct
APPVAGPSVFLFPPKPKDTLMISRTPEVTCVVVDVKHEDPEVKFNWYVDGVEVHNAKTKPREEQYNSTYRVVSVLTVLHQDWLNGKEYKCKVSNKALPAPIEKTISKAKGQPREPQVYTLPPSREQMTKNQVKLTCLVKGFYPSDIAVEWESNGQPENNYKTTPPVLDSDGSFFLYSKLTVDKSRWQQGNVFSCSVLHEALHSHYTQKSLSLSPGK

SEQ ID NO: 128 - protein, 216 aa, Synthetic construct
APPVAGPSVFLFPPKPKDTLMISRTPEVTCVVVDVKHEDPEVKFKWYVDGVEVHNAKTKPREEQYNSTYRVVSVLTVLHQDWLNGKEYKCKVSNKALPAPIEKTISKAKGQPREPQVYTLPPSREQMTKNQVKLTCLVKGFYPSDIAVEWESNGQPENNYKTTPPVLDSDGSFFLYSKLTVDKSRWQQGNVFSCSVMHEALHNHYTQKSLSLSPGK

SEQ ID NO: 129 - protein, 216 aa, Synthetic construct; identical to SEQ ID NO: 106

SEQ ID NO: 130 - protein, 217 aa, Synthetic construct
APEAAGGPSVFLFPPKPKDTLMISRTPEVTCVVVSVSHEDPEVKFNWYVDGVEVHNAKTKPREEQYNSTYRVVSVLTVLHQDWLNGKEYKCKVSNKALPAPIEKTISKAKGQPREPQVYTLPPSREEMTKNQVSLWCLVKGFYPSDIAVEWESNGQPENNYKTTPPVLDSDGSFFLYSKLTVDKSRWQQGNVFSCSVMHEALHNHYTQKSLSLSPGK

SEQ ID NO: 131 - protein, 217 aa, Synthetic construct
APEAAGGPSVFLFPPKPKDTLMISRTPEVTCVVVSVSHEDPEVKFNWYVDGVEVHNAKTKPREEQYNSTYRVVSVLTVLHQDWLNGKEYKCKVSNKALPAPIEKTISKAKGQPREPQVYTLPPSREEMTKNQVSLSCAVKGFYPSDIAVEWESNGQPENNYKTTPPVLDSDGSFFLVSKLTVDKSRWQQGNVFSCSVMHEALHNRFTQKSLSLSPGK

SEQ ID NO: 132 - protein, 217 aa, Synthetic construct
APEAAGGPSVFLFPPKPKDTLYITREPEVTCVVVSVSHEDPEVKFNWYVDGVEVHNAKTKPREEQYNSTYRVVSVLTVLHQDWLNGKEYKCKVSNKALPAPIEKTISKAKGQPREPQVYTLPPSREEMTKNQVSLWCLVKGFYPSDIAVEWESNGQPENNYKTTPPVLDSDGSFFLYSKLTVDKSRWQQGNVFSCSVMHEALHNHYTQKSLSLSPGK

SEQ ID NO: 133 - protein, 217 aa, Synthetic construct
APEAAGGPSVFLFPPKPKDTLYITREPEVTCVVVSVSHEDPEVKFNWYVDGVEVHNAKTKPREEQYNSTYRVVSVLTVLHQDWLNGKEYKCKVSNKALPAPIEKTISKAKGQPREPQVYTLPPSREEMTKNQVSLSCAVKGFYPSDIAVEWESNGQPENNYKTTPPVLDSDGSFFLVSKLTVDKSRWQQGNVFSCSVMHEALHNRFTQKSLSLSPGK

SEQ ID NO: 134 - protein, 216 aa, Synthetic construct
APPVAGPSVFLFPPKPKDTLMISRTPEVTCVVVDVKHEDPEVKFNWYVDGVEVHNAKTKPREEEYNSTYRVVSVLTVLHQDWLNGKEYKCKVSNKALPAPIEKTISKAKGQPREPQVYTLPPSRDELTKNQVSLTCDVSGFYPSDIAVEWESDGQPENNYKTTPPVLDSDGSFFLYSKLTVDKSRWEQGDVFSCSVLHEALHSHYTQKSLSLSPGK

SEQ ID NO: 135 - protein, 216 aa, Synthetic construct
APPVAGPSVFLFPPKPKDTLMISRTPEVTCVVVDVKHEDPEVKFNWYVDGVEVHNAKTKPREEQYNSTYRVVSVLTVLHQDWLNGKEYKCKVSNKALPAPIEKTISKAKGQPREPQVYTLPPSRDQLTKNQVKLTCLVKGFYPSDIAVEWESNGQPENNYKTTPPVLDSDGSFFLYSKLTVDKSRWQQGNVFSCSVLHEALHSHYTQKSLSLSPGK

SEQ ID NO: 136 - protein, 216 aa, Synthetic construct
APPVAGPSVFLFPPKPKDTLMISRTPEVTCVVVDVKHEDPEVKFNWYVDGVEVHNAKTKPREEEYNSTYRVVSVLTVLHQDWLNGKEYKCKVSNKALPAPIEKTISKAKGQPREPQVYTLPPSREEMTKNQVSLTCDVSGFYPSDIAVEWESDGQPENNYKTTPPVLDSDGSFFLYSKLTVDKSRWEQGDVFSCSVLHEALHAHYTQKSLSLSPGK

SEQ ID NO: 137 - protein, 216 aa, Synthetic construct
APPVAGPSVFLFPPKPKDTLMISRTPEVTCVVVDVKHEDPEVKFNWYVDGVEVHNAKTKPREEQYNSTYRVVSVLTVLHQDWLNGKEYKCKVSNKALPAPIEKTISKAKGQPREPQVYTLPPSREQMTKNQVKLTCLVKGFYPSDIAVEWESNGQPENNYKTTPPVLDSDGSFFLYSKLTVDKSRWQQGNVFSCSVLHEALHAHYTQKSLSLSPGK

SEQ ID NO: 138 - protein, 216 aa, Synthetic construct
APPVAGPSVFLFPPKPKDTLMISRTPEVTCVVVDVKHEDPEVKFNWYVDGVEVHNAKTKPREEEYNSTYRVVSVLTVLHQDWLNGKEYKCKVSNKALPAPIEKTISKAKGQPREPQVYTLPPSRDELTKNQVSLTCDVSGFYPSDIAVEWESDGQPENNYKTTPPVLDSDGSFFLYSKLTVDKSRWEQGDVFSCSVLHEALHAHYTQKSLSLSPGK

SEQ ID NO: 139 - protein, 216 aa, Synthetic construct
APPVAGPSVFLFPPKPKDTLMISRTPEVTCVVVDVKHEDPEVKFNWYVDGVEVHNAKTKPREEQYNSTYRVVSVLTVLHQDWLNGKEYKCKVSNKALPAPIEKTISKAKGQPREPQVYTLPPSRDQLTKNQVKLTCLVKGFYPSDIAVEWESNGQPENNYKTTPPVLDSDGSFFLYSKLTVDKSRWQQGNVFSCSVLHEALHAHYTQKSLSLSPGK

SEQ ID NO: 140 - protein, 98 aa, Synthetic construct
ASTKGPSVFPLAPSSKSTSGGTAALGCLVKDYFPEPVTVSWNSGALTSGVHTFPAVLQSSGLYSLSSVVTVPSSSLGTQTYICNVNHKPSNTKVDKKV

SEQ ID NO: 141 - protein, 98 aa, Synthetic construct
ASTKGPSVFPLAPSSKSTSGGTAALGCLVKDYFPEPVTVSWNSGALTSGVHTFPAVLQSSGLYSLSSVVTVPSSSLGTQTYICNVNHKPSDTKVDKKV

SEQ ID NO: 142 - protein, 98 aa, Synthetic construct
ASTKGPSVFPLAPCSRSTSESTAALGCLVKDYFPEPVTVSWNSGALTSGVHTFPAVLQSSGLYSLSSVVTVPSSNFGTQTYTCNVDHKPSNTKVDKTV

SEQ ID NO: 143 - protein, 98 aa, Synthetic construct
ASTKGPSVFPLAPCSRSTSESTAALGCLVKDYFPEPVTVSWNSGALTSGVHTFPAVLQSSGLYSLSSVVTVPSSNFGTQTYTCNVDHKPSDTKVDKTV

SEQ ID NO: 144 - protein, 98 aa, Synthetic construct
ASTKGPSVFPLAPCSRSTSESTAALGCLVKDYFPEPVTVSWNSGALTSGVHTFPAVLQSSGLYSLSSVVTVPSSSLGTKTYTCNVDHKPSNTKVDKRV

SEQ ID NO: 145 - protein, 98 aa, Synthetic construct
ASTKGPSVFPLAPCSRSTSESTAALGCLVKDYFPEPVTVSWNSGALTSGVHTFPAVLQSSGLYSLSSVVTVPSSSLGTKTYTCNVDHKPSDTKVDKRV

SEQ ID NO: 146 - protein, 15 aa, Synthetic construct
EPKSCDKTHTCPPCP

SEQ ID NO: 147 - protein, 12 aa, Synthetic construct
ERKCCVECPPCP

SEQ ID NO: 148 - protein, 12 aa, Synthetic construct
ESKYGPPCPSCP

SEQ ID NO: 149 - protein, 107 aa, Synthetic construct [sequence omitted]

SEQ ID NO: 150 - protein, 106 aa, Synthetic construct
GQPKAAPSVTLFPPSSEELQANKATLVCLISDFYPGAVTVAWKADSSPVKAGVETTTPSKQSNNKYAASSYLSLTPEQWKSHRSYSCQVTHEGSTVEKTVAPTECS

SEQ ID NO: 151 - protein, 121 aa, Synthetic construct
EVQLVESGGGLVKPGGSLKLSCAASGYTFTSYVMHWVRQAPGKGLEWIGYINPYNDGTKYNEKFQGRVTISSDKSISTAYMELSSLRSEDTAMYYCARGTYYYGTRVFDYWGQGTLVTVSS

SEQ ID NO: 152 - protein, 112 aa, Synthetic construct
DIVMTQSPATLSLSPGERATLSCRSSKSLQNVNGNTYLYWFQQKPGQSPQLLIYRMSNLNSGVPDRFSGSGSGTEFTLTISSLEPEDFAVYYCMQHLEYPITFGAGTKLEIK

SEQ ID NO: 153 - protein, 7 aa, Synthetic construct
RMSNLNS

SEQ ID NO: 154 - protein, 254 aa, Synthetic construct
EVQLVESGGGLVQPGGSLRLSCAASGFTFSTYAMNWVRQAPGKGLEWVGRIRSKYNNYATYYADSVKGRFTISRDDSKNTLYLQMNSLRAEDTAVYYCVRHGNFGDSYVSWFAYWGQGTLVTVSSGKPGSGKPGSGKPGSGKPGSQAVVTQEPSLTVSPGGTVTLTCGSSTGAVTTSNYANWVQQKPGKSPRGLIGGTNKRAPGVPARFSGSLLGGKAALTISGAQPEDEADYYCALWYSNHWVFGGGTKLTVL

SEQ ID NO: 155 - protein, 125 aa, Synthetic construct
EVQLVESGGGLVQPGGSLRLSCAASGFTFSTYAMNWVRQAPGKGLEWVGRIRSKYNNYATYYADSVKGRFTISRDDSKNTLYLQMNSLRAEDTAVYYCVRHGNFGDSYVSWFAYWGQGTLVTVSS

SEQ ID NO: 156 - protein, 14 aa, Synthetic construct
HGNFGDSYVSWFAY

SEQ ID NO: 157 - protein, 109 aa, Synthetic construct
QAVVTQEPSLTVSPGGTVTLTCGSSTGAVTTSNYANWVQQKPGKSPRGLIGGTNKRAPGVPARFSGSLLGGKAALTISGAQPEDEADYYCALWYSNHWVFGGGTKLTVL

SEQ ID NO: 158 - protein, 254 aa, Synthetic construct
EVQLVESGGGLVQPGGSLRLSCAASGFTFSTYAMNWVRQAPGKGLEWVGRIRSKANNYATYYADSVKGRFTISRDDSKNTLYLQMNSLRAEDTAVYYCVRHGNFGDSYVSWFAYWGQGTLVTVSSGKPGSGKPGSGKPGSGKPGSQAVVTQEPSLTVSPGGTVTLTCGSSTGAVTTSNYANWVQQKPGKSPRGLIGGTNKRAPGVPARFSGSLLGGKAALTISGAQPEDEADYYCALWYSNHWVFGGGTKLTVL

SEQ ID NO: 159 - protein, 125 aa, Synthetic construct
EVQLVESGGGLVQPGGSLRLSCAASGFTFSTYAMNWVRQAPGKGLEWVGRIRSKANNYATYYADSVKGRFTISRDDSKNTLYLQMNSLRAEDTAVYYCVRHGNFGDSYVSWFAYWGQGTLVTVSS

SEQ ID NO: 160 - protein, 14 aa, Synthetic construct
HGNFGDEYVSWFAY

SEQ ID NO: 161 - protein, 14 aa, Synthetic construct
HGNFGDPYVSWFAY

SEQ ID NO: 162 - protein, 14 aa, Synthetic construct
HGNFGDSYVSWFDY

SEQ ID NO: 163 - protein, 5 aa, Synthetic construct
TYAMS

SEQ ID NO: 164 - protein, 14 aa, Synthetic construct
HENFGGEYVSWFAY

SEQ ID NO: 165 - protein, 254 aa, Synthetic construct
EVQLVESGGGLVQPGGSLRLSCAASGFTFSTYAMNWVRQAPGKGLEWVGRIRSKYNNYATYYADSVKGRFTISRDDSKNTLYLQMNSLRAEDTAVYYCVRHGNFGDEYVSWFAYWGQGTLVTVSSGKPGSGKPGSGKPGSGKPGSQAVVTQEPSLTVSPGGTVTLTCGSSTGAVTTSNYANWVQQKPGKSPRGLIGGTNKRAPGVPARFSGSLLGGKAALTISGAQPEDEADYYCALWYSNHWVFGGGTKLTVL

SEQ ID NO: 166 - protein, 125 aa, Synthetic construct
EVQLVESGGGLVQPGGSLRLSCAASGFTFSTYAMNWVRQAPGKGLEWVGRIRSKYNNYATYYADSVKGRFTISRDDSKNTLYLQMNSLRAEDTAVYYCVRHGNFGDEYVSWFAYWGQGTLVTVSS

SEQ ID NO: 167 - protein, 254 aa, Synthetic construct
EVQLVESGGGLVQPGGSLRLSCAASGFTFSTYAMNWVRQAPGKGLEWVGRIRSKYNNYATYYADSVKGRFTISRDDSKNTLYLQMNSLRAEDTAVYYCVRHGNFGDPYVSWFAYWGQGTLVTVSSGKPGSGKPGSGKPGSGKPGSQAVVTQEPSLTVSPGGTVTLTCGSSTGAVTTSNYANWVQQKPGKSPRGLIGGTNKRAPGVPARFSGSLLGGKAALTISGAQPEDEADYYCALWYSNHWVFGGGTKLTVL

SEQ ID NO: 168 - protein, 125 aa, Synthetic construct
EVQLVESGGGLVQPGGSLRLSCAASGFTFSTYAMNWVRQAPGKGLEWVGRIRSKYNNYATYYADSVKGRFTISRDDSKNTLYLQMNSLRAEDTAVYYCVRHGNFGDPYVSWFAYWGQGTLVTVSS

SEQ ID NO: 169 - protein, 125 aa, Synthetic construct
EVQLVESGGGLVQPGGSLRLSCAASGFTFSTYAMNWVRQAPGKGLEWVGRIRSKYNNYATYYADSVKGRFTISRDDSKNTLYLQMNSLRAEDTAVYYCVRHGNFGDSYVSWFDYWGQGTLVTVSS

SEQ ID NO: 170 - protein, 254 aa, Synthetic construct
EVQLVESGGGLVQPGGSLRLSCAASGFTFSTYAMNWVRQAPGKGLEWVGRIRSKYNNYATYYADSVKGRFTISRDDSKNTLYLQMNSLRAEDTAVYYCVRHGNFGDSYVSWFDYWGQGTLVTVSSGKPGSGKPGSGKPGSGKPGSQAVVTQEPSLTVSPGGTVTLTCGSSTGAVTTSNYANWVQQKPGKSPRGLIGGTNKRAPGVPARFSGSLLGGKAALTISGAQPEDEADYYCALWYSNHWVFGGGTKLTVL

SEQ ID NO: 171 - protein, 125 aa, Synthetic construct
EVQLVESGGGLVQPGGSLRLSCAASGFTFSTYAMSWVRQAPGKGLEWVGRIRSKYNNYATYYADSVKGRFTISRDDSKNTLYLQMNSLRAEDTAVYYCVRHGNFGDSYVSWFAYWGQGTLVTVSS

SEQ ID NO: 172 - protein, 254 aa, Synthetic construct
EVQLVESGGGLVQPGGSLRLSCAASGFTFSTYAMSWVRQAPGKGLEWVGRIRSKYNNYATYYADSVKGRFTISRDDSKNTLYLQMNSLRAEDTAVYYCVRHGNFGDSYVSWFAYWGQGTLVTVSSGKPGSGKPGSGKPGSGKPGSQAVVTQEPSLTVSPGGTVTLTCGSSTGAVTTSNYANWVQQKPGKSPRGLIGGTNKRAPGVPARFSGSLLGGKAALTISGAQPEDEADYYCALWYSNHWVFGGGTKLTVL

SEQ ID NO: 173 - protein, 254 aa, Synthetic construct
QAVVTQEPSLTVSPGGTVTLTCGSSTGAVTTSNYANWVQQKPGKSPRGLIGGTNKRAPGVPARFSGSLLGGKAALTISGAQPEDEADYYCALWYSNHWVFGGGTKLTVLGKPGSGKPGSGKPGSGKPGSEVQLVESGGGLVQPGGSLRLSCAASGFTFSTYAMNWVRQAPGKGLEWVGRIRSKYNNYATYYADSVKGRFTISRDDSKNTLYLQMNSLRAEDTAVYYCVRHGNFGDSYVSWFAYWGQGTLVTVSS

SEQ ID NO: 174 - protein, 254 aa, Synthetic construct
QAVVTQEPSLTVSPGGTVTLTCGSSTGAVTTSNYANWVQQKPGKSPRGLIGGTNKRAPGVPARFSGSLLGGKAALTISGAQPEDEADYYCALWYSNHWVFGGGTKLTVLGKPGSGKPGSGKPGSGKPGSEVQLVESGGGLVQPGGSLRLSCAASGFTFSTYAMNWVRQAPGKGLEWVGRIRSKANNYATYYADSVKGRFTISRDDSKNTLYLQMNSLRAEDTAVYYCVRHGNFGDSYVSWFAYWGQGTLVTVSS

SEQ ID NO: 175 - protein, 254 aa, Synthetic construct
QAVVTQEPSLTVSPGGTVTLTCGSSTGAVTTSNYANWVQQKPGKSPRGLIGGTNKRAPGVPARFSGSLLGGKAALTISGAQPEDEADYYCALWYSNHWVFGGGTKLTVLGKPGSGKPGSGKPGSGKPGSEVQLVESGGGLVQPGGSLRLSCAASGFTFSTYAMNWVRQAPGKGLEWVGRIRSKYNNYATYYADSVKGRFTISRDDSKNTLYLQMNSLRAEDTAVYYCVRHGNFGDEYVSWFAYWGQGTLVTVSS

SEQ ID NO: 176 - protein, 254 aa, Synthetic construct
QAVVTQEPSLTVSPGGTVTLTCGSSTGAVTTSNYANWVQQKPGKSPRGLIGGTNKRAPGVPARFSGSLLGGKAALTISGAQPEDEADYYCALWYSNHWVFGGGTKLTVLGKPGSGKPGSGKPGSGKPGSEVQLVESGGGLVQPGGSLRLSCAASGFTFSTYAMNWVRQAPGKGLEWVGRIRSKYNNYATYYADSVKGRFTISRDDSKNTLYLQMNSLRAEDTAVYYCVRHGNFGDPYVSWFAYWGQGTLVTVSS

SEQ ID NO: 177 - protein, 254 aa, Synthetic construct
QAVVTQEPSLTVSPGGTVTLTCGSSTGAVTTSNYANWVQQKPGKSPRGLIGGTNKRAPGVPARFSGSLLGGKAALTISGAQPEDEADYYCALWYSNHWVFGGGTKLTVLGKPGSGKPGSGKPGSGKPGSEVQLVESGGGLVQPGGSLRLSCAASGFTFSTYAMNWVRQAPGKGLEWVGRIRSKYNNYATYYADSVKGRFTISRDDSKNTLYLQMNSLRAEDTAVYYCVRHGNFGDSYVSWFDYWGQGTLVTVSS

SEQ ID NO: 178 - protein, 254 aa, Synthetic construct
QAVVTQEPSLTVSPGGTVTLTCGSSTGAVTTSNYANWVQQKPGKSPRGLIGGTNKRAPGVPARFSGSLLGGKAALTISGAQPEDEADYYCALWYSNHWVFGGGTKLTVLGKPGSGKPGSGKPGSGKPGSEVQLVESGGGLVQPGGSLRLSCAASGFTFSTYAMSWVRQAPGKGLEWVGRIRSKYNNYATYYADSVKGRFTISRDDSKNTLYLQMNSLRAEDTAVYYCVRHGNFGDSYVSWFAYWGQGTLVTVSS

SEQ ID NO: 179 - protein, 125 aa, Synthetic construct
EVQLVESGGGLVQPGGSLRLSCAASGFTFSTYAMNWVRQAPGKCLEWVGRIRSKYNNYATYYADSVKGRFTISRDDSKNTLYLQMNSLRAEDTAVYYCVRHTNFGDSYVSWFAYWGQGTLVTVSS

SEQ ID NO: 180 - protein, 109 aa, Synthetic construct
QAVVTQEPSLTVSPGGTVTLTCGSSTGAVTTSNYANWVQQKPGKSPRGLIGGTNKRAPGVPARFSGSLLGGKAALTISGAQPEDEADYYCALWYSNHWVFGCGTKLTVL

SEQ ID NO: 181 - protein, 125 aa, Synthetic construct
EVQLVESGGGLVQPGGSLRLSCAASGFTFSTYAMNWVRQAPGKCLEWVGRIRSKYNNYATYYADSVKGRFTISRDDSKNTLYLQMNSLRAEDTAVYYCVRHTNFGGSYVSWFAYWGQGTLVTVSS

SEQ ID NO: 182 - protein, 125 aa, Synthetic construct
EVQLVESGGGLVQPGGSLRLSCAASGFTFSTYAMNWVRQAPGKCLEWVGRIRSKANNYATYYADSVKGRFTISRDDSKNTLYLQMNSLRAEDTAVYYCVRHTNFGDSYVSWFAYWGQGTLVTVSS

SEQ ID NO: 183 - protein, 125 aa, Synthetic construct
EVQLVESGGGLVQPGGSLRLSCAASGFTFSTYAMNWVRQAPGKCLEWVGRIRSKANNYATYYADSVKGRFTISRDDSKNTLYLQMNSLRAEDTAVYYCVRHTNFGGSYVSWFAYWGQGTLVTVSS

SEQ ID NO: 184 - protein, 125 aa, Synthetic construct
EVQLVESGGGLVQPGGSLRLSCAASGFTFSTYAMNWVRQAPGKCLEWVGRIRSKYNNYATYYADSVKGRFTISRDDSKNTLYLQMNSLRAEDTAVYYCVRHENFGGSYVSWFAYWGQGTLVTVSS

SEQ ID NO: 185 - protein, 125 aa, Synthetic construct
EVQLVESGGGLVQPGGSLRLSCAASGFTFSTYAMNWVRQAPGKCLEWVGRIRSKYNNYATYYADSVKGRFTISRDDSKNTLYLQMNSLRAEDTAVYYCVRHENFGDSYVSWFAYWGQGTLVTVSS

SEQ ID NO: 186 - protein, 125 aa, Synthetic construct
EVQLVESGGGLVQPGGSLRLSCAASGFTFSTYAMNWVRQAPGKCLEWVGRIRSKANNYATYYADSVKGRFTISRDDSKNTLYLQMNSLRAEDTAVYYCVRHENFGDSYVSWFAYWGQGTLVTVSS

SEQ ID NO: 187 - protein, 125 aa, Synthetic construct
EVQLVESGGGLVQPGGSLRLSCAASGFTFSTYAMNWVRQAPGKCLEWVGRIRSKANNYATYYADSVKGRFTISRDDSKNTLYLQMNSLRAEDTAVYYCVRHENFGGSYVSWFAYWGQGTLVTVSS

SEQ ID NO: 188 - protein, 125 aa, Synthetic construct
EVQLVESGGGLVQPGGSLRLSCAASGFTFSTYAMNWVRQAPGKCLEWVGRIRSKYNNYATYYADSVKGRFTISRDDSKNTLYLQMNSLRAEDTAVYYCVRHTNFGGEYVSWFAYWGQGTLVTVSS

SEQ ID NO: 189 - protein, 125 aa, Synthetic construct
EVQLVESGGGLVQPGGSLRLSCAASGFTFSTYAMNWVRQAPGKCLEWVGRIRSKYNNYATYYADSVKGRFTISRDDSKNTLYLQMNSLRAEDTAVYYCVRHENFGGEYVSWFAYWGQGTLVTVSS

SEQ ID NO: 190 - protein, 254 aa, Synthetic construct
EVQLVESGGGLVQPGGSLRLSCAASGFTFSTYAMNWVRQAPGKCLEWVGRIRSKYNNYATYYADSVKGRFTISRDDSKNTLYLQMNSLRAEDTAVYYCVRHTNFGDSYVSWFAYWGQGTLVTVSSGKPGSGKPGSGKPGSGKPGSQAVVTQEPSLTVSPGGTVTLTCGSSTGAVTTSNYANWVQQKPGKSPRGLIGGTNKRAPGVPARFSGSLLGGKAALTISGAQPEDEADYYCALWYSNHWVFGCGTKLTVL

SEQ ID NO: 191 - protein, 254 aa, Synthetic construct
EVQLVESGGGLVQPGGSLRLSCAASGFTFSTYAMNWVRQAPGKCLEWVGRIRSKYNNYATYYADSVKGRFTISRDDSKNTLYLQMNSLRAEDTAVYYCVRHTNFGGSYVSWFAYWGQGTLVTVSSGKPGSGKPGSGKPGSGKPGSQAVVTQEPSLTVSPGGTVTLTCGSSTGAVTTSNYANWVQQKPGKSPRGLIGGTNKRAPGVPARFSGSLLGGKAALTISGAQPEDEADYYCALWYSNHWVFGCGTKLTVL

SEQ ID NO: 192 - protein, 254 aa, Synthetic construct
EVQLVESGGGLVQPGGSLRLSCAASGFTFSTYAMNWVRQAPGKCLEWVGRIRSKANNYATYYADSVKGRFTISRDDSKNTLYLQMNSLRAEDTAVYYCVRHTNFGDSYVSWFAYWGQGTLVTVSSGKPGSGKPGSGKPGSGKPGSQAVVTQEPSLTVSPGGTVTLTCGSSTGAVTTSNYANWVQQKPGKSPRGLIGGTNKRAPGVPARFSGSLLGGKAALTISGAQPEDEADYYCALWYSNHWVFGCGTKLTVL

SEQ ID NO: 193 - protein, 254 aa, Synthetic construct
EVQLVESGGGLVQPGGSLRLSCAASGFTFSTYAMNWVRQAPGKCLEWVGRIRSKANNYATYYADSVKGRFTISRDDSKNTLYLQMNSLRAEDTAVYYCVRHTNFGGSYVSWFAYWGQGTLVTVSSGKPGSGKPGSGKPGSGKPGSQAVVTQEPSLTVSPGGTVTLTCGSSTGAVTTSNYANWVQQKPGKSPRGLIGGTNKRAPGVPARFSGSLLGGKAALTISGAQPEDEADYYCALWYSNHWVFGCGTKLTVL

SEQ ID NO: 194 - protein, 254 aa, Synthetic construct
EVQLVESGGGLVQPGGSLRLSCAASGFTFSTYAMNWVRQAPGKCLEWVGRIRSKYNNYATYYADSVKGRFTISRDDSKNTLYLQMNSLRAEDTAVYYCVRHENFGDSYVSWFAYWGQGTLVTVSSGKPGSGKPGSGKPGSGKPGSQAVVTQEPSLTVSPGGTVTLTCGSSTGAVTTSNYANWVQQKPGKSPRGLIGGTNKRAPGVPARFSGSLLGGKAALTISGAQPEDEADYYCALWYSNHWVFGCGTKLTVL

SEQ ID NO: 195 - protein, 254 aa, Synthetic construct
EVQLVESGGGLVQPGGSLRLSCAASGFTFSTYAMNWVRQAPGKCLEWVGRIRSKYNNYATYYADSVKGRFTISRDDSKNTLYLQMNSLRAEDTAVYYCVRHENFGGSYVSWFAYWGQGTLVTVSSGKPGSGKPGSGKPGSGKPGSQAVVTQEPSLTVSPGGTVTLTCGSSTGAVTTSNYANWVQQKPGKSPRGLIGGTNKRAPGVPARFSGSLLGGKAALTISGAQPEDEADYYCALWYSNHWVFGCGTKLTVL

SEQ ID NO: 196 - protein, 254 aa, Synthetic construct
EVQLVESGGGLVQPGGSLRLSCAASGFTFSTYAMNWVRQAPGKCLEWVGRIRSKANNYATYYADSVKGRFTISRDDSKNTLYLQMNSLRAEDTAVYYCVRHENFGDSYVSWFAYWGQGTLVTVSSGKPGSGKPGSGKPGSGKPGSQAVVTQEPSLTVSPGGTVTLTCGSSTGAVTTSNYANWVQQKPGKSPRGLIGGTNKRAPGVPARFSGSLLGGKAALTISGAQPEDEADYYCALWYSNHWVFGCGTKLTVL

SEQ ID NO: 197 - protein, 254 aa, Synthetic construct
EVQLVESGGGLVQPGGSLRLSCAASGFTFSTYAMNWVRQAPGKCLEWVGRIRSKANNYATYYADSVKGRFTISRDDSKNTLYLQMNSLRAEDTAVYYCVRHENFGGSYVSWFAYWGQGTLVTVSSGKPGSGKPGSGKPGSGKPGSQAVVTQEPSLTVSPGGTVTLTCGSSTGAVTTSNYANWVQQKPGKSPRGLIGGTNKRAPGVPARFSGSLLGGKAALTISGAQPEDEADYYCALWYSNHWVFGCGTKLTVL

SEQ ID NO: 198 - protein, 254 aa, Synthetic construct
EVQLVESGGGLVQPGGSLRLSCAASGFTFSTYAMNWVRQAPGKCLEWVGRIRSKYNNYATYYADSVKGRFTISRDDSKNTLYLQMNSLRAEDTAVYYCVRHTNFGGEYVSWFAYWGQGTLVTVSSGKPGSGKPGSGKPGSGKPGSQAVVTQEPSLTVSPGGTVTLTCGSSTGAVTTSNYANWVQQKPGKSPRGLIGGTNKRAPGVPARFSGSLLGGKAALTISGAQPEDEADYYCALWYSNHWVFGCGTKLTVL

SEQ ID NO: 199 - protein, 254 aa, Synthetic construct
EVQLVESGGGLVQPGGSLRLSCAASGFTFSTYAMNWVRQAPGKCLEWVGRIRSKYNNYATYYADSVKGRFTISRDDSKNTLYLQMNSLRAEDTAVYYCVRHENFGGEYVSWFAYWGQGTLVTVSSGKPGSGKPGSGKPGSGKPGSQAVVTQEPSLTVSPGGTVTLTCGSSTGAVTTSNYANWVQQKPGKSPRGLIGGTNKRAPGVPARFSGSLLGGKAALTISGAQPEDEADYYCALWYSNHWVFGCGTKLTVL

SEQ ID NO: 200 - protein, 254 aa, Synthetic construct
QAVVTQEPSLTVSPGGTVTLTCGSSTGAVTTSNYANWVQQKPGKSPRGLIGGTNKRAPGVPARFSGSLLGGKAALTISGAQPEDEADYYCALWYSNHWVFGCGTKLTVLGKPGSGKPGSGKPGSGKPGSEVQLVESGGGLVQPGGSLRLSCAASGFTFSTYAMNWVRQAPGKCLEWVGRIRSKYNNYATYYADSVKGRFTISRDDSKNTLYLQMNSLRAEDTAVYYCVRHTNFGDSYVSWFAYWGQGTLVTVSS

SEQ ID NO: 201 - protein, 254 aa, Synthetic construct
QAVVTQEPSLTVSPGGTVTLTCGSSTGAVTTSNYANWVQQKPGKSPRGLIGGTNKRAPGVPARFSGSLLGGKAALTISGAQPEDEADYYCALWYSNHWVFGCGTKLTVLGKPGSGKPGSGKPGSGKPGSEVQLVESGGGLVQPGGSLRLSCAASGFTFSTYAMNWVRQAPGKCLEWVGRIRSKYNNYATYYADSVKGRFTISRDDSKNTLYLQMNSLRAEDTAVYYCVRHTNFGGSYVSWFAYWGQGTLVTVSS

SEQ ID NO: 202 - protein, 254 aa, Synthetic construct
QAVVTQEPSLTVSPGGTVTLTCGSSTGAVTTSNYANWVQQKPGKSPRGLIGGTNKRAPGVPARFSGSLLGGKAALTISGAQPEDEADYYCALWYSNHWVFGCGTKLTVLGKPGSGKPGSGKPGSGKPGSEVQLVESGGGLVQPGGSLRLSCAASGFTFSTYAMNWVRQAPGKCLEWVGRIRSKANNYATYYADSVKGRFTISRDDSKNTLYLQMNSLRAEDTAVYYCVRHTNFGDSYVSWFAYWGQGTLVTVSS

SEQ ID NO: 203 - protein, 254 aa, Synthetic construct
QAVVTQEPSLTVSPGGTVTLTCGSSTGAVTTSNYANWVQQKPGKSPRGLIGGTNKRAPGVPARFSGSLLGGKAALTISGAQPEDEADYYCALWYSNHWVFGCGTKLTVLGKPGSGKPGSGKPGSGKPGSEVQLVESGGGLVQPGGSLRLSCAASGFTFSTYAMNWVRQAPGKCLEWVGRIRSKANNYATYYADSVKGRFTISRDDSKNTLYLQMNSLRAEDTAVYYCVRHTNFGGSYVSWFAYWGQGTLVTVSS

SEQ ID NO: 204 - protein, 254 aa, Synthetic construct
QAVVTQEPSLTVSPGGTVTLTCGSSTGAVTTSNYANWVQQKPGKSPRGLIGGTNKRAPGVPARFSGSLLGGKAALTISGAQPEDEADYYCALWYSNHWVFGCGTKLTVLGKPGSGKPGSGKPGSGKPGSEVQLVESGGGLVQPGGSLRLSCAASGFTFSTYAMNWVRQAPGKCLEWVGRIRSKYNNYATYYADSVKGRFTISRDDSKNTLYLQMNSLRAEDTAVYYCVRHENFGDSYVSWFAYWGQGTLVTVSS

SEQ ID NO: 205 - protein, 254 aa, Synthetic construct
QAVVTQEPSLTVSPGGTVTLTCGSSTGAVTTSNYANWVQQKPGKSPRGLIGGTNKRAPGVPARFSGSLLGGKAALTISGAQPEDEADYYCALWYSNHWVFGCGTKLTVLGKPGSGKPGSGKPGSGKPGSEVQLVESGGGLVQPGGSLRLSCAASGFTFSTYAMNWVRQAPGKCLEWVGRIRSKYNNYATYYADSVKGRFTISRDDSKNTLYLQMNSLRAEDTAVYYCVRHENFGGSYVSWFAYWGQGTLVTVSS

SEQ ID NO: 206 - protein, 254 aa, Synthetic construct
QAVVTQEPSLTVSPGGTVTLTCGSSTGAVTTSNYANWVQQKPGKSPRGLIGGTNKRAPGVPARFSGSLLGGKAALTISGAQPEDEADYYCALWYSNHWVFGCGTKLTVLGKPGSGKPGSGKPGSGKPGSEVQLVESGGGLVQPGGSLRLSCAASGFTFSTYAMNWVRQAPGKCLEWVGRIRSKANNYATYYADSVKGRFTISRDDSKNTLYLQMNSLRAEDTAVYYCVRHENFGDSYVSWFAYWGQGTLVTVSS

SEQ ID NO: 207 - protein, 254 aa, Synthetic construct
QAVVTQEPSLTVSPGGTVTLTCGSSTGAVTTSNYANWVQQKPGKSPRGLIGGTNKRAPGVPARFSGSLLGGKAALTISGAQPEDEADYYCALWYSNHWVFGCGTKLTVLGKPGSGKPGSGKPGSGKPGSEVQLVESGGGLVQPGGSLRLSCAASGFTFSTYAMNWVRQAPGKCLEWVGRIRSKANNYATYYADSVKGRFTISRDDSKNTLYLQMNSLRAEDTAVYYCVRHENFGGSYVSWFAYWGQGTLVTVSS

SEQ ID NO: 208 - protein, 254 aa, Synthetic construct
QAVVTQEPSLTVSPGGTVTLTCGSSTGAVTTSNYANWVQQKPGKSPRGLIGGTNKRAPGVPARFSGSLLGGKAALTISGAQPEDEADYYCALWYSNHWVFGCGTKLTVLGKPGSGKPGSGKPGSGKPGSEVQLVESGGGLVQPGGSLRLSCAASGFTFSTYAMNWVRQAPGKCLEWVGRIRSKYNNYATYYADSVKGRFTISRDDSKNTLYLQMNSLRAEDTAVYYCVRHTNFGGEYVSWFAYWGQGTLVTVSS

SEQ ID NO: 209 - protein, 254 aa, Synthetic construct
QAVVTQEPSLTVSPGGTVTLTCGSSTGAVTTSNYANWVQQKPGKSPRGLIGGTNKRAPGVPARFSGSLLGGKAALTISGAQPEDEADYYCALWYSNHWVFGCGTKLTVLGKPGSGKPGSGKPGSGKPGSEVQLVESGGGLVQPGGSLRLSCAASGFTFSTYAMNWVRQAPGKCLEWVGRIRSKYNNYATYYADSVKGRFTISRDDSKNTLYLQMNSLRAEDTAVYYCVRHENFGGEYVSWFAYWGQGTLVTVSS

SEQ ID NO: 210 - protein, 450 aa, Synthetic construct
QVQLVQSGAEVKKPGASVKVSCKASGYTFTSYVMHWVRQAPGQGLEWMGYINPYNDGTKYNEKFQGRVTITSDKSTSTAYMELSSLRSEDTAVYYCARGTYYYGTRVFDYWGQGTLVTVSSASTKGPSVFPLAPSSKSTSGGTAALGCLVKDYFPEPVTVSWNSGALTSGVHTFPAVLQSSGLYSLSSVVTVPSSSLGTQTYICNVNHKPSDTKVDKKVEPKSCDKTHTCPPCPAPPVAGPSVFLFPPKPKDTLMISRTPEVTCVVVDVKHEDPEVKFNWYVDGVEVHNAKTKPREEEYNSTYRVVSVLTVLHQDWLNGKEYKCKVSNKALPAPIEKTISKAKGQPREPQVYTLPPSREEMTKNQVSLTCDVSGFYPSDIAVEWESDGQPENNYKTTPPVLDSDGSFFLYSKLTVDKSRWEQGDVFSCSVLHEALHSHYTQKSLSLSPGK

SEQ ID NO: 211 - protein, 485 aa, Synthetic construct
EVQLVESGGGLVQPGGSLRLSCAASGFTFSTYAMNWVRQAPGKGLEWVGRIRSKYNNYATYYADSVKGRFTISRDDSKNTLYLQMNSLRAEDTAVYYCVRHGNFGDSYVSWFAYWGQGTLVTVSSGKPGSGKPGSGKPGSGKPGSQAVVTQEPSLTVSPGGTVTLTCGSSTGAVTTSNYANWVQQKPGKSPRGLIGGTNKRAPGVPARFSGSLLGGKAALTISGAQPEDEADYYCALWYSNHWVFGGGTKLTVLEPKSSDKTHTCPPCPAPPVAGPSVFLFPPKPKDTLMISRTPEVTCVVVDVKHEDPEVKFNWYVDGVEVHNAKTKPREEQYNSTYRVVSVLTVLHQDWLNGKEYKCKVSNKALPAPIEKTISKAKGQPREPQVYTLPPSREQMTKNQVKLTCLVKGFYPSDIAVEWESNGQPENNYKTTPPVLDSDGSFFLYSKLTVDKSRWQQGNVFSCSVLHEALHSHYTQKSLSLSPGK

SEQ ID NO: 212 - protein, 219 aa, Synthetic construct
DIVMTQSPLSLPVTPGEPASISCRSSKSLQNVNGNTYLYWFLQKPGQSPQLLIYRASNLNSGVPDRFSGSGSGTDFTLKISRVEAEDVGVYYCMQHLEYPITFGQGTKLEIKRTVAAPSVFIFPPSDEQLKSGTASVVCLLNNFYPREAKVQWKVDNALQSGNSQESVTEQDSKDSTYSLSSTLTLSKADYEKHKVYACEVTHQGLSSPVTKSFNRGEC

SEQ ID NO: 213 - protein, 450 aa, Synthetic construct
EVQLVESGGGLVKPGGSLKLSCAASGYTFTSYVMHWVRQAPGKGLEWIGYINPYNDGTKYNEKFQGRVTISSDKSISTAYMELSSLRSEDTAMYYCARGTYYYGTRVFDYWGQGTLVTVSSASTKGPSVFPLAPSSKSTSGGTAALGCLVKDYFPEPVTVSWNSGALTSGVHTFPAVLQSSGLYSLSSVVTVPSSSLGTQTYICNVNHKPSDTKVDKKVEPKSCDKTHTCPPCPAPPVAGPSVFLFPPKPKDTLMISRTPEVTCVVVDVKHEDPEVKFNWYVDGVEVHNAKTKPREEEYNSTYRVVSVLTVLHQDWLNGKEYKCKVSNKALPAPIEKTISKAKGQPREPQVYTLPPSREEMTKNQVSLTCDVSGFYPSDIAVEWESDGQPENNYKTTPPVLDSDGSFFLYSKLTVDKSRWEQGDVFSCSVMHEALHNHYTQKSLSLSPGK

SEQ ID NO: 214 - protein, 485 aa, Synthetic construct
EVQLVESGGGLVQPGGSLRLSCAASGFTFSTYAMNWVRQAPGKGLEWVGRIRSKYNNYATYYADSVKGRFTISRDDSKNTLYLQMNSLRAEDTAVYYCVRHGNFGDEYVSWFAYWGQGTLVTVSSGKPGSGKPGSGKPGSGKPGSQAVVTQEPSLTVSPGGTVTLTCGSSTGAVTTSNYANWVQQKPGKSPRGLIGGTNKRAPGVPARFSGSLLGGKAALTISGAQPEDEADYYCALWYSNHWVFGGGTKLTVLEPKSSDKTHTCPPCPAPPVAGPSVFLFPPKPKDTLMISRTPEVTCVVVDVKHEDPEVKFNWYVDGVEVHNAKTKPREEQYNSTYRVVSVLTVLHQDWLNGKEYKCKVSNKALPAPIEKTISKAKGQPREPQVYTLPPSREQMTKNQVKLTCLVKGFYPSDIAVEWESNGQPENNYKTTPPVLDSDGSFFLYSKLTVDKSRWQQGNVFSCSVMHEALHNHYTQKSLSLSPGK

SEQ ID NO: 215 - protein, 219 aa, Synthetic construct
DIVMTQSPATLSLSPGERATLSCRSSKSLQNVNGNTYLYWFQQKPGQSPQLLIYRMSNLNSGVPDRFSGSGSGTEFTLTISSLEPEDFAVYYCMQHLEYPITFGAGTKLEIKRTVAAPSVFIFPPSDEQLKSGTASVVCLLNNFYPREAKVQWKVDNALQSGNSQESVTEQDSKDSTYSLSSTLTLSKADYEKHKVYACEVTHQGLSSPVTKSFNRGEC

SEQ ID NO: 216 - protein, 485 aa, Synthetic construct
EVQLVESGGGLVQPGGSLRLSCAASGFTFSTYAMNWVRQAPGKGLEWVGRIRSKYNNYATYYADSVKGRFTISRDDSKNTLYLQMNSLRAEDTAVYYCVRHGNFGDSYVSWFDYWGQGTLVTVSSGKPGSGKPGSGKPGSGKPGSQAVVTQEPSLTVSPGGTVTLTCGSSTGAVTTSNYANWVQQKPGKSPRGLIGGTNKRAPGVPARFSGSLLGGKAALTISGAQPEDEADYYCALWYSNHWVFGGGTKLTVLEPKSSDKTHTCPPCPAPPVAGPSVFLFPPKPKDTLMISRTPEVTCVVVDVKHEDPEVKFNWYVDGVEVHNAKTKPREEQYNSTYRVVSVLTVLHQDWLNGKEYKCKVSNKALPAPIEKTISKAKGQPREPQVYTLPPSREQMTKNQVKLTCLVKGFYPSDIAVEWESNGQPENNYKTTPPVLDSDGSFFLYSKLTVDKSRWQQGNVFSCSVMHEALHNHYTQKSLSLSPGK

SEQ ID NO: 217 - protein, 485 aa, Synthetic construct
EVQLVESGGGLVQPGGSLRLSCAASGFTFSTYAMNWVRQAPGKGLEWVGRIRSKANNYATYYADSVKGRFTISRDDSKNTLYLQMNSLRAEDTAVYYCVRHGNFGDSYVSWFAYWGQGTLVTVSSGKPGSGKPGSGKPGSGKPGSQAVVTQEPSLTVSPGGTVTLTCGSSTGAVTTSNYANWVQQKPGKSPRGLIGGTNKRAPGVPARFSGSLLGGKAALTISGAQPEDEADYYCALWYSNHWVFGGGTKLTVLEPKSSDKTHTCPPCPAPPVAGPSVFLFPPKPKDTLMISRTPEVTCVVVDVKHEDPEVKFNWYVDGVEVHNAKTKPREEQYNSTYRVVSVLTVLHQDWLNGKEYKCKVSNKALPAPIEKTISKAKGQPREPQVYTLPPSREQMTKNQVKLTCLVKGFYPSDIAVEWESNGQPENNYKTTPPVLDSDGSFFLYSKLTVDKSRWQQGNVFSCSVMHEALHNHYTQKSLSLSPGK

SEQ ID NO: 218 - protein, 485 aa, Synthetic construct
EVQLVESGGGLVQPGGSLRLSCAASGFTFSTYAMNWVRQAPGKGLEWVGRIRSKYNNYATYYADSVKGRFTISRDDSKNTLYLQMNSLRAEDTAVYYCVRHGNFGDSYVSWFAYWGQGTLVTVSSGKPGSGKPGSGKPGSGKPGSQAVVTQEPSLTVSPGGTVTLTCGSSTGAVTTSNYANWVQQKPGKSPRGLIGGTNKRAPGVPARFSGSLLGGKAALTISGAQPEDEADYYCALWYSNHWVFGGGTKLTVLEPKSSDKTHTCPPCPAPPVAGPSVFLFPPKPKDTLMISRTPEVTCVVVDVKHEDPEVKFNWYVDGVEVHNAKTKPREEQYNSTYRVVSVLTVLHQDWLNGKEYKCKVSNKALPAPIEKTISKAKGQPREPQVYTLPPSREQMTKNQVKLTCLVKGFYPSDIAVEWESNGQPENNYKTTPPVLDSDGSFFLYSKLTVDKSRWQQGNVFSCSVMHEALHNHYTQKSLSLSPGK

SEQ ID NO: 219 - protein, 723 aa, Synthetic construct
QVQLVQSGAEVKKPGASVKVSCKASGYTFTSYVMHWVRQAPGQGLEWMGYINPYNDGTKYNEKFQGRVTITSDKSTSTAYMELSSLRSEDTAVYYCARGTYYYGTRVFDYWGQGTLVTVSSASTKGPSVFPLAPSSKSTSGGTAALGCLVKDYFPEPVTVSWNSGALTSGVHTFPAVLQSSGLYSLSSVVTVPSSSLGTQTYICNVNHKPSNTKVDKKVEPKSCGGGGSGGGGSQAVVTQEPSLTVSPGGTVTLTCGSSTGAVTTSNYANWVQQKPGKSPRGLIGGTNKRAPGVPARFSGSLLGGKAALTISGAQPEDEADYYCALWYSNHWVFGCGTKLTVLGKPGSGKPGSGKPGSGKPGSEVQLVESGGGLVQPGGSLRLSCAASGFTFSTYAMNWVRQAPGKCLEWVGRIRSKYNNYATYYADSVKGRFTISRDDSKNTLYLQMNSLRAEDTAVYYCVRHENFGGEYVSWFAYWGQGTLVTVSSGGGGSGGGGSKTHTCPPCPAPPVAGPSVFLFPPKPKDTLMISRTPEVTCVVVDVKHEDPEVKFNWYVDGVEVHNAKTKPREEQYNSTYRVVSVLTVLHQDWLNGKEYKCKVSNKALPAPIEKTISKAKGQPREPQVYTLPPSREQMTKNQVKLTCLVKGFYPSDIAVEWESNGQPENNYKTTPPVLDSDGSFFLYSKLTVDKSRWQQGNVFSCSVLHEALHSHYTQKSLSLSPGK

SEQ ID NO: 220 - protein, 723 aa, Synthetic construct
QVQLVQSGAEVKKPGASVKVSCKASGYTFTSYVMHWVRQAPGQGLEWMGYINPYNDGTKYNEKFQGRVTITSDKSTSTAYMELSSLRSEDTAVYYCARGTYYYGTRVFDYWGQGTLVTVSSASTKGPSVFPLAPSSKSTSGGTAALGCLVKDYFPEPVTVSWNSGALTSGVHTFPAVLQSSGLYSLSSVVTVPSSSLGTQTYICNVNHKPSNTKVDKKVEPKSCGGGGSGGGGSQAVVTQEPSLTVSPGGTVTLTCGSSTGAVTTSNYANWVQQKPGKSPRGLIGGTNKRAPGVPARFSGSLLGGKAALTISGAQPEDEADYYCALWYSNHWVFGCGTKLTVLGKPGSGKPGSGKPGSGKPGSEVQLVESGGGLVQPGGSLRLSCAASGFTFSTYAMNWVRQAPGKCLEWVGRIRSKYNNYATYYADSVKGRFTISRDDSKNTLYLQMNSLRAEDTAVYYCVRHTNFGGEYVSWFAYWGQGTLVTVSSGGGGSGGGGSKTHTCPPCPAPPVAGPSVFLFPPKPKDTLMISRTPEVTCVVVDVKHEDPEVKFNWYVDGVEVHNAKTKPREEQYNSTYRVVSVLTVLHQDWLNGKEYKCKVSNKALPAPIEKTISKAKGQPREPQVYTLPPSREQMTKNQVKLTCLVKGFYPSDIAVEWESNGQPENNYKTTPPVLDSDGSFFLYSKLTVDKSRWQQGNVFSCSVLHEALHSHYTQKSLSLSPGK

SEQ ID NO: 221 - protein, 723 aa, Synthetic construct
QVQLVQSGAEVKKPGASVKVSCKASGYTFTSYVMHWVRQAPGQGLEWMGYINPYNDGTKYNEKFQGRVTITSDKSTSTAYMELSSLRSEDTAVYYCARGTYYYGTRVFDYWGQGTLVTVSSASTKGPSVFPLAPSSKSTSGGTAALGCLVKDYFPEPVTVSWNSGALTSGVHTFPAVLQSSGLYSLSSVVTVPSSSLGTQTYICNVNHKPSNTKVDKKVEPKSCGGGGSGGGGSQAVVTQEPSLTVSPGGTVTLTCGSSTGAVTTSNYANWVQQKPGKSPRGLIGGTNKRAPGVPARFSGSLLGGKAALTISGAQPEDEADYYCALWYSNHWVFGCGTKLTVLGKPGSGKPGSGKPGSGKPGSEVQLVESGGGLVQPGGSLRLSCAASGFTFSTYAMNWVRQAPGKCLEWVGRIRSKANNYATYYADSVKGRFTISRDDSKNTLYLQMNSLRAEDTAVYYCVRHENFGGSYVSWFAYWGQGTLVTVSSGGGGSGGGGSKTHTCPPCPAPPVAGPSVFLFPPKPKDTLMISRTPEVTCVVVDVKHEDPEVKFNWYVDGVEVHNAKTKPREEQYNSTYRVVSVLTVLHQDWLNGKEYKCKVSNKALPAPIEKTISKAKGQPREPQVYTLPPSREQMTKNQVKLTCLVKGFYPSDIAVEWESNGQPENNYKTTPPVLDSDGSFFLYSKLTVDKSRWQQGNVFSCSVLHEALHSHYTQKSLSLSPGK

SEQ ID NO: 222 - protein, 723 aa, Synthetic construct
QVQLVQSGAEVKKPGASVKVSCKASGYTFTSYVMHWVRQAPGQGLEWMGYINPYNDGTKYNEKFQGRVTITSDKSTSTAYMELSSLRSEDTAVYYCARGTYYYGTRVFDYWGQGTLVTVSSASTKGPSVFPLAPSSKSTSGGTAALGCLVKDYFPEPVTVSWNSGALTSGVHTFPAVLQSSGLYSLSSVVTVPSSSLGTQTYICNVNHKPSNTKVDKKVEPKSCGGGGSGGGGSQAVVTQEPSLTVSPGGTVTLTCGSSTGAVTTSNYANWVQQKPGKSPRGLIGGTNKRAPGVPARFSGSLLGGKAALTISGAQPEDEADYYCALWYSNHWVFGCGTKLTVLGKPGSGKPGSGKPGSGKPGSEVQLVESGGGLVQPGGSLRLSCAASGFTFSTYAMNWVRQAPGKCLEWVGRIRSKANNYATYYADSVKGRFTISRDDSKNTLYLQMNSLRAEDTAVYYCVRHENFGDSYVSWFAYWGQGTLVTVSSGGGGSGGGGSKTHTCPPCPAPPVAGPSVFLFPPKPKDTLMISRTPEVTCVVVDVKHEDPEVKFNWYVDGVEVHNAKTKPREEQYNSTYRVVSVLTVLHQDWLNGKEYKCKVSNKALPAPIEKTISKAKGQPREPQVYTLPPSREQMTKNQVKLTCLVKGFYPSDIAVEWESNGQPENNYKTTPPVLDSDGSFFLYSKLTVDKSRWQQGNVFSCSVLHEALHSHYTQKSLSLSPGK

SEQ ID NO: 223 - protein, 723 aa, Synthetic construct
QVQLVQSGAEVKKPGASVKVSCKASGYTFTSYVMHWVRQAPGQGLEWMGYINPYNDGTKYNEKFQGRVTITSDKSTSTAYMELSSLRSEDTAVYYCARGTYYYGTRVFDYWGQGTLVTVSSASTKGPSVFPLAPSSKSTSGGTAALGCLVKDYFPEPVTVSWNSGALTSGVHTFPAVLQSSGLYSLSSVVTVPSSSLGTQTYICNVNHKPSNTKVDKKVEPKSCGGGGSGGGGSQAVVTQEPSLTVSPGGTVTLTCGSSTGAVTTSNYANWVQQKPGKSPRGLIGGTNKRAPGVPARFSGSLLGGKAALTISGAQPEDEADYYCALWYSNHWVFGCGTKLTVLGKPGSGKPGSGKPGSGKPGSEVQLVESGGGLVQPGGSLRLSCAASGFTFSTYAMNWVRQAPGKCLEWVGRIRSKYNNYATYYADSVKGRFTISRDDSKNTLYLQMNSLRAEDTAVYYCVRHENFGGSYVSWFAYWGQGTLVTVSSGGGGSGGGGSKTHTCPPCPAPPVAGPSVFLFPPKPKDTLMISRTPEVTCVVVDVKHEDPEVKFNWYVDGVEVHNAKTKPREEQYNSTYRVVSVLTVLHQDWLNGKEYKCKVSNKALPAPIEKTISKAKGQPREPQVYTLPPSREQMTKNQVKLTCLVKGFYPSDIAVEWESNGQPENNYKTTPPVLDSDGSFFLYSKLTVDKSRWQQGNVFSCSVLHEALHSHYTQKSLSLSPGK

SEQ ID NO: 224 - protein, 723 aa, Synthetic construct
QVQLVQSGAEVKKPGASVKVSCKASGYTFTSYVMHWVRQAPGQGLEWMGYINPYNDGTKYNEKFQGRVTITSDKSTSTAYMELSSLRSEDTAVYYCARGTYYYGTRVFDYWGQGTLVTVSSASTKGPSVFPLAPSSKSTSGGTAALGCLVKDYFPEPVTVSWNSGALTSGVHTFPAVLQSSGLYSLSSVVTVPSSSLGTQTYICNVNHKPSNTKVDKKVEPKSCGGGGSGGGGSQAVVTQEPSLTVSPGGTVTLTCGSSTGAVTTSNYANWVQQKPGKSPRGLIGGTNKRAPGVPARFSGSLLGGKAALTISGAQPEDEADYYCALWYSNHWVFGCGTKLTVLGKPGSGKPGSGKPGSGKPGSEVQLVESGGGLVQPGGSLRLSCAASGFTFSTYAMNWVRQAPGKCLEWVGRIRSKYNNYATYYADSVKGRFTISRDDSKNTLYLQMNSLRAEDTAVYYCVRHENFGDSYVSWFAYWGQGTLVTVSSGGGGSGGGGSKTHTCPPCPAPPVAGPSVFLFPPKPKDTLMISRTPEVTCVVVDVKHEDPEVKFNWYVDGVEVHNAKTKPREEQYNSTYRVVSVLTVLHQDWLNGKEYKCKVSNKALPAPIEKTISKAKGQPREPQVYTLPPSREQMTKNQVKLTCLVKGFYPSDIAVEWESNGQPENNYKTTPPVLDSDGSFFLYSKLTVDKSRWQQGNVFSCSVLHEALHSHYTQKSLSLSPGK

SEQ ID NO: 225 - protein, 723 aa, Synthetic construct
QVQLVQSGAEVKKPGASVKVSCKASGYTFTSYVMHWVRQAPGQGLEWMGYINPYNDGTKYNEKFQGRVTITSDKSTSTAYMELSSLRSEDTAVYYCARGTYYYGTRVFDYWGQGTLVTVSSASTKGPSVFPLAPSSKSTSGGTAALGCLVKDYFPEPVTVSWNSGALTSGVHTFPAVLQSSGLYSLSSVVTVPSSSLGTQTYICNVNHKPSNTKVDKKVEPKSCGGGGSGGGGSQAVVTQEPSLTVSPGGTVTLTCGSSTGAVTTSNYANWVQQKPGKSPRGLIGGTNKRAPGVPARFSGSLLGGKAALTISGAQPEDEADYYCALWYSNHWVFGCGTKLTVLGKPGSGKPGSGKPGSGKPGSEVQLVESGGGLVQPGGSLRLSCAASGFTFSTYAMNWVRQAPGKCLEWVGRIRSKANNYATYYADSVKGRFTISRDDSKNTLYLQMNSLRAEDTAVYYCVRHTNFGGSYVSWFAYWGQGTLVTVSSGGGGSGGGGSKTHTCPPCPAPPVAGPSVFLFPPKPKDTLMISRTPEVTCVVVDVKHEDPEVKFNWYVDGVEVHNAKTKPREEQYNSTYRVVSVLTVLHQDWLNGKEYKCKVSNKALPAPIEKTISKAKGQPREPQVYTLPPSREQMTKNQVKLTCLVKGFYPSDIAVEWESNGQPENNYKTTPPVLDSDGSFFLYSKLTVDKSRWQQGNVFSCSVLHEALHSHYTQKSLSLSPGK

SEQ ID NO: 226 - protein, 723 aa, Synthetic construct
QVQLVQSGAEVKKPGASVKVSCKASGYTFTSYVMHWVRQAPGQGLEWMGYINPYNDGTKYNEKFQGRVTITSDKSTSTAYMELSSLRSEDTAVYYCARGTYYYGTRVFDYWGQGTLVTVSSASTKGPSVFPLAPSSKSTSGGTAALGCLVKDYFPEPVTVSWNSGALTSGVHTFPAVLQSSGLYSLSSVVTVPSSSLGTQTYICNVNHKPSNTKVDKKVEPKSCGGGGSGGGGSQAVVTQEPSLTVSPGGTVTLTCGSSTGAVTTSNYANWVQQKPGKSPRGLIGGTNKRAPGVPARFSGSLLGGKAALTISGAQPEDEADYYCALWYSNHWVFGCGTKLTVLGKPGSGKPGSGKPGSGKPGSEVQLVESGGGLVQPGGSLRLSCAASGFTFSTYAMNWVRQAPGKCLEWVGRIRSKANNYATYYADSVKGRFTISRDDSKNTLYLQMNSLRAEDTAVYYCVRHTNFGDSYVSWFAYWGQGTLVTVSSGGGGSGGGGSKTHTCPPCPAPPVAGPSVFLFPPKPKDTLMISRTPEVTCVVVDVKHEDPEVKFNWYVDGVEVHNAKTKPREEQYNSTYRVVSVLTVLHQDWLNGKEYKCKVSNKALPAPIEKTISKAKGQPREPQVYTLPPSREQMTKNQVKLTCLVKGFYPSDIAVEWESNGQPENNYKTTPPVLDSDGSFFLYSKLTVDKSRWQQGNVFSCSVLHEALHSHYTQKSLSLSPGK

SEQ ID NO: 227 - protein, 723 aa, Synthetic construct
QVQLVQSGAEVKKPGASVKVSCKASGYTFTSYVMHWVRQAPGQGLEWMGYINPYNDGTKYNEKFQGRVTITSDKSTSTAYMELSSLRSEDTAVYYCARGTYYYGTRVFDYWGQGTLVTVSSASTKGPSVFPLAPSSKSTSGGTAALGCLVKDYFPEPVTVSWNSGALTSGVHTFPAVLQSSGLYSLSSVVTVPSSSLGTQTYICNVNHKPSNTKVDKKVEPKSCGGGGSGGGGSQAVVTQEPSLTVSPGGTVTLTCGSSTGAVTTSNYANWVQQKPGKSPRGLIGGTNKRAPGVPARFSGSLLGGKAALTISGAQPEDEADYYCALWYSNHWVFGCGTKLTVLGKPGSGKPGSGKPGSGKPGSEVQLVESGGGLVQPGGSLRLSCAASGFTFSTYAMNWVRQAPGKCLEWVGRIRSKYNNYATYYADSVKGRFTISRDDSKNTLYLQMNSLRAEDTAVYYCVRHTNFGGSYVSWFAYWGQGTLVTVSSGGGGSGGGGSKTHTCPPCPAPPVAGPSVFLFPPKPKDTLMISRTPEVTCVVVDVKHEDPEVKFNWYVDGVEVHNAKTKPREEQYNSTYRVVSVLTVLHQDWLNGKEYKCKVSNKALPAPIEKTISKAKGQPREPQVYTLPPSREQMTKNQVKLTCLVKGFYPSDIAVEWESNGQPENNYKTTPPVLDSDGSFFLYSKLTVDKSRWQQGNVFSCSVLHEALHSHYTQKSLSLSPGK

SEQ ID NO: 228 - protein, 723 aa, Synthetic construct
QVQLVQSGAEVKKPGASVKVSCKASGYTFTSYVMHWVRQAPGQGLEWMGYINPYNDGTKYNEKFQGRVTITSDKSTSTAYMELSSLRSEDTAVYYCARGTYYYGTRVFDYWGQGTLVTVSSASTKGPSVFPLAPSSKSTSGGTAALGCLVKDYFPEPVTVSWNSGALTSGVHTFPAVLQSSGLYSLSSVVTVPSSSLGTQTYICNVNHKPSNTKVDKKVEPKSCGGGGSGGGGSQAVVTQEPSLTVSPGGTVTLTCGSSTGAVTTSNYANWVQQKPGKSPRGLIGGTNKRAPGVPARFSGSLLGGKAALTISGAQPEDEADYYCALWYSNHWVFGCGTKLTVLGKPGSGKPGSGKPGSGKPGSEVQLVESGGGLVQPGGSLRLSCAASGFTFSTYAMNWVRQAPGKCLEWVGRIRSKYNNYATYYADSVKGRFTISRDDSKNTLYLQMNSLRAEDTAVYYCVRHTNFGDSYVSWFAYWGQGTLVTVSSGGGGSGGGGSKTHTCPPCPAPPVAGPSVFLFPPKPKDTLMISRTPEVTCVVVDVKHEDPEVKFNWYVDGVEVHNAKTKPREEQYNSTYRVVSVLTVLHQDWLNGKEYKCKVSNKALPAPIEKTISKAKGQPREPQVYTLPPSREQMTKNQVKLTCLVKGFYPSDIAVEWESNGQPENNYKTTPPVLDSDGSFFLYSKLTVDKSRWQQGNVFSCSVLHEALHSHYTQKSLSLSPGK

SEQ ID NO: 229 - protein, 719 aa, Synthetic construct
QVQLVQSGAEVKKPGASVKVSCKASGYTFTSYVMHWVRQAPGQGLEWMGYINPYNDGTKYNEKFQGRVTITSDKSTSTAYMELSSLRSEDTAVYYCARGTYYYGTRVFDYWGQGTLVTVSSASTKGPSVFPLAPSSKSTSGGTAALGCLVKDYFPEPVTVSWNSGALTSGVHTFPAVLQSSGLYSLSSVVTVPSSSLGTQTYICNVNHKPSNTKVDKKVEPKSCGGGGSGGGGSQAVVTQEPSLTVSPGGTVTLTCGSSTGAVTTSNYANWVQQKPGKSPRGLIGGTNKRAPGVPARFSGSLLGGKAALTISGAQPEDEADYYCALWYSNHWVFGGGTKLTVLGKPGSGKPGSGKPGSGKPGSEVQLVESGGGLVQPGGSLRLSCAASGFTFSTYAMNWVRQAPGKGLEWVGRIRSKYNNYATYYADSVKGRFTISRDDSKNTLYLQMNSLRAEDTAVYYCVRHGNFGDEYVSWFAYWGQGTLVTVSSEPKSSDKTHTCPPCPAPPVAGPSVFLFPPKPKDTLMISRTPEVTCVVVDVKHEDPEVKFNWYVDGVEVHNAKTKPREEQYNSTYRVVSVLTVLHQDWLNGKEYKCKVSNKALPAPIEKTISKAKGQPREPQVYTLPPSREQMTKNQVKLTCLVKGFYPSDIAVEWESNGQPENNYKTTPPVLDSDGSFFLYSKLTVDKSRWQQGNVFSCSVLHEALHSHYTQKSLSLSPGK

SEQ ID NO: 230 - protein, 723 aa, Synthetic construct
QVQLVQSGAEVKKPGASVKVSCKASGYTFTSYVMHWVRQAPGQGLEWMGYINPYNDGTKYNEKFQGRVTITSDKSTSTAYMELSSLRSEDTAVYYCARGTYYYGTRVFDYWGQGTLVTVSSASTKGPSVFPLAPSSKSTSGGTAALGCLVKDYFPEPVTVSWNSGALTSGVHTFPAVLQSSGLYSLSSVVTVPSSSLGTQTYICNVNHKPSNTKVDKKVEPKSCGGGGSGGGGSQAVVTQEPSLTVSPGGTVTLTCGSSTGAVTTSNYANWVQQKPGKSPRGLIGGTNKRAPGVPARFSGSLLGGKAALTISGAQPEDEADYYCALWYSNHWVFGGGTKLTVLGKPGSGKPGSGKPGSGKPGSEVQLVESGGGLVQPGGSLRLSCAASGFTFSTYAMNWVRQAPGKGLEWVGRIRSKANNYATYYADSVKGRFTISRDDSKNTLYLQMNSLRAEDTAVYYCVRHGNFGDSYVSWFAYWGQGTLVTVSSGGGGSGGGGSKTHTCPPCPAPPVAGPSVFLFPPKPKDTLMISRTPEVTCVVVDVKHEDPEVKFNWYVDGVEVHNAKTKPREEQYNSTYRVVSVLTVLHQDWLNGKEYKCKVSNKALPAPIEKTISKAKGQPREPQVYTLPPSREQMTKNQVKLTCLVKGFYPSDIAVEWESNGQPENNYKTTPPVLDSDGSFFLYSKLTVDKSRWQQGNVFSCSVLHEALHSHYTQKSLSLSPGK

SEQ ID NO: 231 - protein, 723 aa, Synthetic construct
QVQLVQSGAEVKKPGASVKVSCKASGYTFTSYVMHWVRQAPGQGLEWMGYINPYNDGTKYNEKFQGRVTITSDKSTSTAYMELSSLRSEDTAVYYCARGTYYYGTRVFDYWGQGTLVTVSSASTKGPSVFPLAPSSKSTSGGTAALGCLVKDYFPEPVTVSWNSGALTSGVHTFPAVLQSSGLYSLSSVVTVPSSSLGTQTYICNVNHKPSNTKVDKKVEPKSCGGGGSGGGGSEVQLVESGGGLVQPGGSLRLSCAASGFTFSTYAMNWVRQAPGKGLEWVGRIRSKYNNYATYYADSVKGRFTISRDDSKNTLYLQMNSLRAEDTAVYYCVRHGNFGDSYVSWFAYWGQGTLVTVSSGKPGSGKPGSGKPGSGKPGSQAVVTQEPSLTVSPGGTVTLTCGSSTGAVTTSNYANWVQQKPGKSPRGLIGGTNKRAPGVPARFSGSLLGGKAALTISGAQPEDEADYYCALWYSNHWVFGGGTKLTVLGGGGSGGGGSKTHTCPPCPAPPVAGPSVFLFPPKPKDTLMISRTPEVTCVVVDVKHEDPEVKFNWYVDGVEVHNAKTKPREEQYNSTYRVVSVLTVLHQDWLNGKEYKCKVSNKALPAPIEKTISKAKGQPREPQVYTLPPSREQMTKNQVKLTCLVKGFYPSDIAVEWESNGQPENNYKTTPPVLDSDGSFFLYSKLTVDKSRWQQGNVFSCSVLHEALHSHYTQKSLSLSPGK

SEQ ID NO: 232 - protein, 450 aa, Synthetic construct
EVQLVESGGGLVKPGGSLKLSCAASGYTFTSYVMHWVRQAPGKGLEWIGYINPYNDGTKYNEKFQGRVTISSDKSISTAYMELSSLRSEDTAMYYCARGTYYYGTRVFDYWGQGTLVTVSSASTKGPSVFPLAPSSKSTSGGTAALGCLVKDYFPEPVTVSWNSGALTSGVHTFPAVLQSSGLYSLSSVVTVPSSSLGTQTYICNVNHKPSDTKVDKKVEPKSCDKTHTCPPCPAPPVAGPSVFLFPPKPKDTLMISRTPEVTCVVVDVKHEDPEVKFNWYVDGVEVHNAKTKPREEEYNSTYRVVSVLTVLHQDWLNGKEYKCKVSNKALPAPIEKTISKAKGQPREPQVYTLPPSREEMTKNQVSLTCDVSGFYPSDIAVEWESDGQPENNYKTTPPVLDSDGSFFLYSKLTVDKSRWEQGDVFSCSVLHEALHSHYTQKSLSLSPGK

SEQ ID NO: 233 - protein, 723 aa, Synthetic construct
EVQLVESGGGLVKPGGSLKLSCAASGYTFTSYVMHWVRQAPGKGLEWIGYINPYNDGTKYNEKFQGRVTISSDKSISTAYMELSSLRSEDTAMYYCARGTYYYGTRVFDYWGQGTLVTVSSASTKGPSVFPLAPSSKSTSGGTAALGCLVKDYFPEPVTVSWNSGALTSGVHTFPAVLQSSGLYSLSSVVTVPSSSLGTQTYICNVNHKPSNTKVDKKVEPKSCGGGGSGGGGSQAVVTQEPSLTVSPGGTVTLTCGSSTGAVTTSNYANWVQQKPGKSPRGLIGGTNKRAPGVPARFSGSLLGGKAALTISGAQPEDEADYYCALWYSNHWVFGCGTKLTVLGKPGSGKPGSGKPGSGKPGSEVQLVESGGGLVQPGGSLRLSCAASGFTFSTYAMNWVRQAPGKCLEWVGRIRSKYNNYATYYADSVKGRFTISRDDSKNTLYLQMNSLRAEDTAVYYCVRHENFGGEYVSWFAYWGQGTLVTVSSGGGGSGGGGSKTHTCPPCPAPPVAGPSVFLFPPKPKDTLMISRTPEVTCVVVDVKHEDPEVKFNWYVDGVEVHNAKTKPREEQYNSTYRVVSVLTVLHQDWLNGKEYKCKVSNKALPAPIEKTISKAKGQPREPQVYTLPPSREQMTKNQVKLTCLVKGFYPSDIAVEWESNGQPENNYKTTPPVLDSDGSFFLYSKLTVDKSRWQQGNVFSCSVLHEALHSHYTQKSLSLSPGK

SEQ ID NO: 234 - protein, 723 aa, Synthetic construct
EVQLVESGGGLVKPGGSLKLSCAASGYTFTSYVMHWVRQAPGKGLEWIGYINPYNDGTKYNEKFQGRVTISSDKSISTAYMELSSLRSEDTAMYYCARGTYYYGTRVFDYWGQGTLVTVSSASTKGPSVFPLAPSSKSTSGGTAALGCLVKDYFPEPVTVSWNSGALTSGVHTFPAVLQSSGLYSLSSVVTVPSSSLGTQTYICNVNHKPSNTKVDKKVEPKSCGGGGSGGGGSQAVVTQEPSLTVSPGGTVTLTCGSSTGAVTTSNYANWVQQKPGKSPRGLIGGTNKRAPGVPARFSGSLLGGKAALTISGAQPEDEADYYCALWYSNHWVFGCGTKLTVLGKPGSGKPGSGKPGSGKPGSEVQLVESGGGLVQPGGSLRLSCAASGFTFSTYAMNWVRQAPGKCLEWVGRIRSKYNNYATYYADSVKGRFTISRDDSKNTLYLQMNSLRAEDTAVYYCVRHTNFGGEYVSWFAYWGQGTLVTVSSGGGGSGGGGSKTHTCPPCPAPPVAGPSVFLFPPKPKDTLMISRTPEVTCVVVDVKHEDPEVKFNWYVDGVEVHNAKTKPREEQYNSTYRVVSVLTVLHQDWLNGKEYKCKVSNKALPAPIEKTISKAKGQPREPQVYTLPPSREQMTKNQVKLTCLVKGFYPSDIAVEWESNGQPENNYKTTPPVLDSDGSFFLYSKLTVDKSRWQQGNVFSCSVLHEALHSHYTQKSLSLSPGK

SEQ ID NO: 235 - protein, 723 aa, Synthetic construct
EVQLVESGGGLVKPGGSLKLSCAASGYTFTSYVMHWVRQAPGKGLEWIGYINPYNDGTKYNEKFQGRVTISSDKSISTAYMELSSLRSEDTAMYYCARGTYYYGTRVFDYWGQGTLVTVSSASTKGPSVFPLAPSSKSTSGGTAALGCLVKDYFPEPVTVSWNSGALTSGVHTFPAVLQSSGLYSLSSVVTVPSSSLGTQTYICNVNHKPSNTKVDKKVEPKSCGGGGSGGGGSQAVVTQEPSLTVSPGGTVTLTCGSSTGAVTTSNYANWVQQKPGKSPRGLIGGTNKRAPGVPARFSGSLLGGKAALTISGAQPEDEADYYCALWYSNHWVFGCGTKLTVLGKPGSGKPGSGKPGSGKPGSEVQLVESGGGLVQPGGSLRLSCAASGFTFSTYAMNWVRQAPGKCLEWVGRIRSKANNYATYYADSVKGRFTISRDDSKNTLYLQMNSLRAEDTAVYYCVRHENFGGSYVSWFAYWGQGTLVTVSSGGGGSGGGGSKTHTCPPCPAPPVAGPSVFLFPPKPKDTLMISRTPEVTCVVVDVKHEDPEVKFNWYVDGVEVHNAKTKPREEQYNSTYRVVSVLTVLHQDWLNGKEYKCKVSNKALPAPIEKTISKAKGQPREPQVYTLPPSREQMTKNQVKLTCLVKGFYPSDIAVEWESNGQPENNYKTTPPVLDSDGSFFLYSKLTVDKSRWQQGNVFSCSVLHEALHSHYTQKSLSLSPGK

SEQ ID NO: 236 - protein, 723 aa, Synthetic construct
EVQLVESGGGLVKPGGSLKLSCAASGYTFTSYVMHWVRQAPGKGLEWIGYINPYNDGTKYNEKFQGRVTISSDKSISTAYMELSSLRSEDTAMYYCARGTYYYGTRVFDYWGQGTLVTVSSASTKGPSVFPLAPSSKSTSGGTAALGCLVKDYFPEPVTVSWNSGALTSGVHTFPAVLQSSGLYSLSSVVTVPSSSLGTQTYICNVNHKPSNTKVDKKVEPKSCGGGGSGGGGSQAVVTQEPSLTVSPGGTVTLTCGSSTGAVTTSNYANWVQQKPGKSPRGLIGGTNKRAPGVPARFSGSLLGGKAALTISGAQPEDEADYYCALWYSNHWVFGCGTKLTVLGKPGSGKPGSGKPGSGKPGSEVQLVESGGGLVQPGGSLRLSCAASGFTFSTYAMNWVRQAPGKCLEWVGRIRSKANNYATYYADSVKGRFTISRDDSKNTLYLQMNSLRAEDTAVYYCVRHENFGDSYVSWFAYWGQGTLVTVSSGGGGSGGGGSKTHTCPPCPAPPVAGPSVFLFPPKPKDTLMISRTPEVTCVVVDVKHEDPEVKFNWYVDGVEVHNAKTKPREEQYNSTYRVVSVLTVLHQDWLNGKEYKCKVSNKALPAPIEKTISKAKGQPREPQVYTLPPSREQMTKNQVKLTCLVKGFYPSDIAVEWESNGQPENNYKTTPPVLDSDGSFFLYSKLTVDKSRWQQGNVFSCSVLHEALHSHYTQKSLSLSPGK

SEQ ID NO: 237 - protein, 723 aa, Synthetic construct
EVQLVESGGGLVKPGGSLKLSCAASGYTFTSYVMHWVRQAPGKGLEWIGYINPYNDGTKYNEKFQGRVTISSDKSISTAYMELSSLRSEDTAMYYCARGTYYYGTRVFDYWGQGTLVTVSSASTKGPSVFPLAPSSKSTSGGTAALGCLVKDYFPEPVTVSWNSGALTSGVHTFPAVLQSSGLYSLSSVVTVPSSSLGTQTYICNVNHKPSNTKVDKKVEPKSCGGGGSGGGGSQAVVTQEPSLTVSPGGTVTLTCGSSTGAVTTSNYANWVQQKPGKSPRGLIGGTNKRAPGVPARFSGSLLGGKAALTISGAQPEDEADYYCALWYSNHWVFGCGTKLTVLGKPGSGKPGSGKPGSGKPGSEVQLVESGGGLVQPGGSLRLSCAASGFTFSTYAMNWVRQAPGKCLEWVGRIRSKYNNYATYYADSVKGRFTISRDDSKNTLYLQMNSLRAEDTAVYYCVRHENFGGSYVSWFAYWGQGTLVTVSSGGGGSGGGGSKTHTCPPCPAPPVAGPSVFLFPPKPKDTLMISRTPEVTCVVVDVKHEDPEVKFNWYVDGVEVHNAKTKPREEQYNSTYRVVSVLTVLHQDWLNGKEYKCKVSNKALPAPIEKTISKAKGQPREPQVYTLPPSREQMTKNQVKLTCLVKGFYPSDIAVEWESNGQPENNYKTTPPVLDSDGSFFLYSKLTVDKSRWQQGNVFSCSVLHEALHSHYTQKSLSLSPGK

SEQ ID NO: 238 - protein, 723 aa, Synthetic construct
EVQLVESGGGLVKPGGSLKLSCAASGYTFTSYVMHWVRQAPGKGLEWIGYINPYNDGTKYNEKFQGRVTISSDKSISTAYMELSSLRSEDTAMYYCARGTYYYGTRVFDYWGQGTLVTVSSASTKGPSVFPLAPSSKSTSGGTAALGCLVKDYFPEPVTVSWNSGALTSGVHTFPAVLQSSGLYSLSSVVTVPSSSLGTQTYICNVNHKPSNTKVDKKVEPKSCGGGGSGGGGSQAVVTQEPSLTVSPGGTVTLTCGSSTGAVTTSNYANWVQQKPGKSPRGLIGGTNKRAPGVPARFSGSLLGGKAALTISGAQPEDEADYYCALWYSNHWVFGCGTKLTVLGKPGSGKPGSGKPGSGKPGSEVQLVESGGGLVQPGGSLRLSCAASGFTFSTYAMNWVRQAPGKCLEWVGRIRSKYNNYATYYADSVKGRFTISRDDSKNTLYLQMNSLRAEDTAVYYCVRHENFGDSYVSWFAYWGQGTLVTVSSGGGGSGGGGSKTHTCPPCPAPPVAGPSVFLFPPKPKDTLMISRTPEVTCVVVDVKHEDPEVKFNWYVDGVEVHNAKTKPREEQYNSTYRVVSVLTVLHQDWLNGKEYKCKVSNKALPAPIEKTISKAKGQPREPQVYTLPPSREQMTKNQVKLTCLVKGFYPSDIAVEWESNGQPENNYKTTPPVLDSDGSFFLYSKLTVDKSRWQQGNVFSCSVLHEALHSHYTQKSLSLSPGK

SEQ ID NO: 239 - protein, 723 aa, Synthetic construct
EVQLVESGGGLVKPGGSLKLSCAASGYTFTSYVMHWVRQAPGKGLEWIGYINPYNDGTKYNEKFQGRVTISSDKSISTAYMELSSLRSEDTAMYYCARGTYYYGTRVFDYWGQGTLVTVSSASTKGPSVFPLAPSSKSTSGGTAALGCLVKDYFPEPVTVSWNSGALTSGVHTFPAVLQSSGLYSLSSVVTVPSSSLGTQTYICNVNHKPSNTKVDKKVEPKSCGGGGSGGGGSQAVVTQEPSLTVSPGGTVTLTCGSSTGAVTTSNYANWVQQKPGKSPRGLIGGTNKRAPGVPARFSGSLLGGKAALTISGAQPEDEADYYCALWYSNHWVFGCGTKLTVLGKPGSGKPGSGKPGSGKPGSEVQLVESGGGLVQPGGSLRLSCAASGFTFSTYAMNWVRQAPGKCLEWVGRIRSKANNYATYYADSVKGRFTISRDDSKNTLYLQMNSLRAEDTAVYYCVRHTNFGGSYVSWFAYWGQGTLVTVSSGGGGSGGGGSKTHTCPPCPAPPVAGPSVFLFPPKPKDTLMISRTPEVTCVVVDVKHEDPEVKFNWYVDGVEVHNAKTKPREEQYNSTYRVVSVLTVLHQDWLNGKEYKCKVSNKALPAPIEKTISKAKGQPREPQVYTLPPSREQMTKNQVKLTCLVKGFYPSDIAVEWESNGQPENNYKTTPPVLDSDGSFFLYSKLTVDKSRWQQGNVFSCSVLHEALHSHYTQKSLSLSPGK

SEQ ID NO: 240 - protein, 723 aa, Synthetic construct
EVQLVESGGGLVKPGGSLKLSCAASGYTFTSYVMHWVRQAPGKGLEWIGYINPYNDGTKYNEKFQGRVTISSDKSISTAYMELSSLRSEDTAMYYCARGTYYYGTRVFDYWGQGTLVTVSSASTKGPSVFPLAPSSKSTSGGTAALGCLVKDYFPEPVTVSWNSGALTSGVHTFPAVLQSSGLYSLSSVVTVPSSSLGTQTYICNVNHKPSNTKVDKKVEPKSCGGGGSGGGGSQAVVTQEPSLTVSPGGTVTLTCGSSTGAVTTSNYANWVQQKPGKSPRGLIGGTNKRAPGVPARFSGSLLGGKAALTISGAQPEDEADYYCALWYSNHWVFGCGTKLTVLGKPGSGKPGSGKPGSGKPGSEVQLVESGGGLVQPGGSLRLSCAASGFTFSTYAMNWVRQAPGKCLEWVGRIRSKANNYATYYADSVKGRFTISRDDSKNTLYLQMNSLRAEDTAVYYCVRHTNFGDSYVSWFAYWGQGTLVTVSSGGGGSGGGGSKTHTCPPCPAPPVAGPSVFLFPPKPKDTLMISRTPEVTCVVVDVKHEDPEVKFNWYVDGVEVHNAKTKPREEQYNSTYRVVSVLTVLHQDWLNGKEYKCKVSNKALPAPIEKTISKAKGQPREPQVYTLPPSREQMTKNQVKLTCLVKGFYPSDIAVEWESNGQPENNYKTTPPVLDSDGSFFLYSKLTVDKSRWQQGNVFSCSVLHEALHSHYTQKSLSLSPGK

SEQ ID NO: 241 - protein, 723 aa, Synthetic construct
EVQLVESGGGLVKPGGSLKLSCAASGYTFTSYVMHWVRQAPGKGLEWIGYINPYNDGTKYNEKFQGRVTISSDKSISTAYMELSSLRSEDTAMYYCARGTYYYGTRVFDYWGQGTLVTVSSASTKGPSVFPLAPSSKSTSGGTAALGCLVKDYFPEPVTVSWNSGALTSGVHTFPAVLQSSGLYSLSSVVTVPSSSLGTQTYICNVNHKPSNTKVDKKVEPKSCGGGGSGGGGSQAVVTQEPSLTVSPGGTVTLTCGSSTGAVTTSNYANWVQQKPGKSPRGLIGGTNKRAPGVPARFSGSLLGGKAALTISGAQPEDEADYYCALWYSNHWVFGCGTKLTVLGKPGSGKPGSGKPGSGKPGSEVQLVESGGGLVQPGGSLRLSCAASGFTFSTYAMNWVRQAPGKCLEWVGRIRSKYNNYATYYADSVKGRFTISRDDSKNTLYLQMNSLRAEDTAVYYCVRHTNFGGSYVSWFAYWGQGTLVTVSSGGGGSGGGGSKTHTCPPCPAPPVAGPSVFLFPPKPKDTLMISRTPEVTCVVVDVKHEDPEVKFNWYVDGVEVHNAKTKPREEQYNSTYRVVSVLTVLHQDWLNGKEYKCKVSNKALPAPIEKTISKAKGQPREPQVYTLPPSREQMTKNQVKLTCLVKGFYPSDIAVEWESNGQPENNYKTTPPVLDSDGSFFLYSKLTVDKSRWQQGNVFSCSVLHEALHSHYTQKSLSLSPGK

SEQ ID NO: 242 - protein, 723 aa, Synthetic construct
EVQLVESGGGLVKPGGSLKLSCAASGYTFTSYVMHWVRQAPGKGLEWIGYINPYNDGTKYNEKFQGRVTISSDKSISTAYMELSSLRSEDTAMYYCARGTYYYGTRVFDYWGQGTLVTVSSASTKGPSVFPLAPSSKSTSGGTAALGCLVKDYFPEPVTVSWNSGALTSGVHTFPAVLQSSGLYSLSSVVTVPSSSLGTQTYICNVNHKPSNTKVDKKVEPKSCGGGGSGGGGSQAVVTQEPSLTVSPGGTVTLTCGSSTGAVTTSNYANWVQQKPGKSPRGLIGGTNKRAPGVPARFSGSLLGGKAALTISGAQPEDEADYYCALWYSNHWVFGCGTKLTVLGKPGSGKPGSGKPGSGKPGSEVQLVESGGGLVQPGGSLRLSCAASGFTFSTYAMNWVRQAPGKCLEWVGRIRSKYNNYATYYADSVKGRFTISRDDSKNTLYLQMNSLRAEDTAVYYCVRHTNFGDSYVSWFAYWGQGTLVTVSSGGGGSGGGGSKTHTCPPCPAPPVAGPSVFLFPPKPKDTLMISRTPEVTCVVVDVKHEDPEVKFNWYVDGVEVHNAKTKPREEQYNSTYRVVSVLTVLHQDWLNGKEYKCKVSNKALPAPIEKTISKAKGQPREPQVYTLPPSREQMTKNQVKLTCLVKGFYPSDIAVEWESNGQPENNYKTTPPVLDSDGSFFLYSKLTVDKSRWQQGNVFSCSVLHEALHSHYTQKSLSLSPGK

SEQ ID NO: 243 - protein, 719 aa, Synthetic construct
EVQLVESGGGLVKPGGSLKLSCAASGYTFTSYVMHWVRQAPGKGLEWIGYINPYNDGTKYNEKFQGRVTISSDKSISTAYMELSSLRSEDTAMYYCARGTYYYGTRVFDYWGQGTLVTVSSASTKGPSVFPLAPSSKSTSGGTAALGCLVKDYFPEPVTVSWNSGALTSGVHTFPAVLQSSGLYSLSSVVTVPSSSLGTQTYICNVNHKPSNTKVDKKVEPKSCGGGGSGGGGSQAVVTQEPSLTVSPGGTVTLTCGSSTGAVTTSNYANWVQQKPGKSPRGLIGGTNKRAPGVPARFSGSLLGGKAALTISGAQPEDEADYYCALWYSNHWVFGGGTKLTVLGKPGSGKPGSGKPGSGKPGSEVQLVESGGGLVQPGGSLRLSCAASGFTFSTYAMNWVRQAPGKGLEWVGRIRSKYNNYATYYADSVKGRFTISRDDSKNTLYLQMNSLRAEDTAVYYCVRHGNFGDEYVSWFAYWGQGTLVTVSSEPKSSDKTHTCPPCPAPPVAGPSVFLFPPKPKDTLMISRTPEVTCVVVDVKHEDPEVKFNWYVDGVEVHNAKTKPREEQYNSTYRVVSVLTVLHQDWLNGKEYKCKVSNKALPAPIEKTISKAKGQPREPQVYTLPPSREQMTKNQVKLTCLVKGFYPSDIAVEWESNGQPENNYKTTPPVLDSDGSFFLYSKLTVDKSRWQQGNVFSCSVLHEALHSHYTQKSLSLSPGK

SEQ ID NO: 244 - protein, 723 aa, Synthetic construct
EVQLVESGGGLVKPGGSLKLSCAASGYTFTSYVMHWVRQAPGKGLEWIGYINPYNDGTKYNEKFQGRVTISSDKSISTAYMELSSLRSEDTAMYYCARGTYYYGTRVFDYWGQGTLVTVSSASTKGPSVFPLAPSSKSTSGGTAALGCLVKDYFPEPVTVSWNSGALTSGVHTFPAVLQSSGLYSLSSVVTVPSSSLGTQTYICNVNHKPSNTKVDKKVEPKSCGGGGSGGGGSQAVVTQEPSLTVSPGGTVTLTCGSSTGAVTTSNYANWVQQKPGKSPRGLIGGTNKRAPGVPARFSGSLLGGKAALTISGAQPEDEADYYCALWYSNHWVFGGGTKLTVLGKPGSGKPGSGKPGSGKPGSEVQLVESGGGLVQPGGSLRLSCAASGFTFSTYAMNWVRQAPGKGLEWVGRIRSKANNYATYYADSVKGRFTISRDDSKNTLYLQMNSLRAEDTAVYYCVRHGNFGDSYVSWFAYWGQGTLVTVSSGGGGSGGGGSKTHTCPPCPAPPVAGPSVFLFPPKPKDTLMISRTPEVTCVVVDVKHEDPEVKFNWYVDGVEVHNAKTKPREEQYNSTYRVVSVLTVLHQDWLNGKEYKCKVSNKALPAPIEKTISKAKGQPREPQVYTLPPSREQMTKNQVKLTCLVKGFYPSDIAVEWESNGQPENNYKTTPPVLDSDGSFFLYSKLTVDKSRWQQGNVFSCSVLHEALHSHYTQKSLSLSPGK

SEQ ID NO: 245 - protein, 723 aa, Synthetic construct
EVQLVESGGGLVKPGGSLKLSCAASGYTFTSYVMHWVRQAPGKGLEWIGYINPYNDGTKYNEKFQGRVTISSDKSISTAYMELSSLRSEDTAMYYCARGTYYYGTRVFDYWGQGTLVTVSSASTKGPSVFPLAPSSKSTSGGTAALGCLVKDYFPEPVTVSWNSGALTSGVHTFPAVLQSSGLYSLSSVVTVPSSSLGTQTYICNVNHKPSNTKVDKKVEPKSCGGGGSGGGGSEVQLVESGGGLVQPGGSLRLSCAASGFTFSTYAMNWVRQAPGKGLEWVGRIRSKYNNYATYYADSVKGRFTISRDDSKNTLYLQMNSLRAEDTAVYYCVRHGNFGDSYVSWFAYWGQGTLVTVSSGKPGSGKPGSGKPGSGKPGSQAVVTQEPSLTVSPGGTVTLTCGSSTGAVTTSNYANWVQQKPGKSPRGLIGGTNKRAPGVPARFSGSLLGGKAALTISGAQPEDEADYYCALWYSNHWVFGGGTKLTVLGGGGSGGGGSKTHTCPPCPAPPVAGPSVFLFPPKPKDTLMISRTPEVTCVVVDVKHEDPEVKFNWYVDGVEVHNAKTKPREEQYNSTYRVVSVLTVLHQDWLNGKEYKCKVSNKALPAPIEKTISKAKGQPREPQVYTLPPSREQMTKNQVKLTCLVKGFYPSDIAVEWESNGQPENNYKTTPPVLDSDGSFFLYSKLTVDKSRWQQGNVFSCSVLHEALHSHYTQKSLSLSPGK

SEQ ID NO: 246 - protein, 723 aa, Synthetic construct
EVQLVESGGGLVKPGGSLKLSCAASGYTFTSYVMHWVRQAPGKGLEWIGYINPYNDGTKYNEKFQGRVTISSDKSISTAYMELSSLRSEDTAMYYCARGTYYYGTRVFDYWGQGTLVTVSSASTKGPSVFPLAPSSKSTSGGTAALGCLVKDYFPEPVTVSWNSGALTSGVHTFPAVLQSSGLYSLSSVVTVPSSSLGTQTYICNVNHKPSNTKVDKKVEPKSCGGGGSGGGGSEVQLVESGGGLVQPGGSLRLSCAASGFTFSTYAMNWVRQAPGKGLEWVGRIRSKYNNYATYYADSVKGRFTISRDDSKNTLYLQMNSLRAEDTAVYYCVRHGNFGDEYVSWFAYWGQGTLVTVSSGKPGSGKPGSGKPGSGKPGSQAVVTQEPSLTVSPGGTVTLTCGSSTGAVTTSNYANWVQQKPGKSPRGLIGGTNKRAPGVPARFSGSLLGGKAALTISGAQPEDEADYYCALWYSNHWVFGGGTKLTVLGGGGSGGGGSKTHTCPPCPAPPVAGPSVFLFPPKPKDTLMISRTPEVTCVVVDVKHEDPEVKFNWYVDGVEVHNAKTKPREEQYNSTYRVVSVLTVLHQDWLNGKEYKCKVSNKALPAPIEKTISKAKGQPREPQVYTLPPSREQMTKNQVKLTCLVKGFYPSDIAVEWESNGQPENNYKTTPPVLDSDGSFFLYSKLTVDKSRWQQGNVFSCSVMHEALHNHYTQKSLSLSPGK

SEQ ID NO: 247 - protein, 723 aa, Synthetic construct
EVQLVESGGGLVKPGGSLKLSCAASGYTFTSYVMHWVRQAPGKGLEWIGYINPYNDGTKYNEKFQGRVTISSDKSISTAYMELSSLRSEDTAMYYCARGTYYYGTRVFDYWGQGTLVTVSSASTKGPSVFPLAPSSKSTSGGTAALGCLVKDYFPEPVTVSWNSGALTSGVHTFPAVLQSSGLYSLSSVVTVPSSSLGTQTYICNVNHKPSNTKVDKKVEPKSCGGGGSGGGGSEVQLVESGGGLVQPGGSLRLSCAASGFTFSTYAMNWVRQAPGKGLEWVGRIRSKYNNYATYYADSVKGRFTISRDDSKNTLYLQMNSLRAEDTAVYYCVRHGNFGDSYVSWFDYWGQGTLVTVSSGKPGSGKPGSGKPGSGKPGSQAVVTQEPSLTVSPGGTVTLTCGSSTGAVTTSNYANWVQQKPGKSPRGLIGGTNKRAPGVPARFSGSLLGGKAALTISGAQPEDEADYYCALWYSNHWVFGGGTKLTVLGGGGSGGGGSKTHTCPPCPAPPVAGPSVFLFPPKPKDTLMISRTPEVTCVVVDVKHEDPEVKFNWYVDGVEVHNAKTKPREEQYNSTYRVVSVLTVLHQDWLNGKEYKCKVSNKALPAPIEKTISKAKGQPREPQVYTLPPSREQMTKNQVKLTCLVKGFYPSDIAVEWESNGQPENNYKTTPPVLDSDGSFFLYSKLTVDKSRWQQGNVFSCSVMHEALHNHYTQKSLSLSPGK

SEQ ID NO: 248 - protein, 723 aa, Synthetic construct
EVQLVESGGGLVKPGGSLKLSCAASGYTFTSYVMHWVRQAPGKGLEWIGYINPYNDGTKYNEKFQGRVTISSDKSISTAYMELSSLRSEDTAMYYCARGTYYYGTRVFDYWGQGTLVTVSSASTKGPSVFPLAPSSKSTSGGTAALGCLVKDYFPEPVTVSWNSGALTSGVHTFPAVLQSSGLYSLSSVVTVPSSSLGTQTYICNVNHKPSNTKVDKKVEPKSCGGGGSGGGGSEVQLVESGGGLVQPGGSLRLSCAASGFTFSTYAMNWVRQAPGKGLEWVGRIRSKANNYATYYADSVKGRFTISRDDSKNTLYLQMNSLRAEDTAVYYCVRHGNFGDSYVSWFAYWGQGTLVTVSSGKPGSGKPGSGKPGSGKPGSQAVVTQEPSLTVSPGGTVTLTCGSSTGAVTTSNYANWVQQKPGKSPRGLIGGTNKRAPGVPARFSGSLLGGKAALTISGAQPEDEADYYCALWYSNHWVFGGGTKLTVLGGGGSGGGGSKTHTCPPCPAPPVAGPSVFLFPPKPKDTLMISRTPEVTCVVVDVKHEDPEVKFNWYVDGVEVHNAKTKPREEQYNSTYRVVSVLTVLHQDWLNGKEYKCKVSNKALPAPIEKTISKAKGQPREPQVYTLPPSREQMTKNQVKLTCLVKGFYPSDIAVEWESNGQPENNYKTTPPVLDSDGSFFLYSKLTVDKSRWQQGNVFSCSVMHEALHNHYTQKSLSLSPGK

SEQ ID NO: 249 - protein, 723 aa, Synthetic construct
EVQLVESGGGLVKPGGSLKLSCAASGYTFTSYVMHWVRQAPGKGLEWIGYINPYNDGTKYNEKFQGRVTISSDKSISTAYMELSSLRSEDTAMYYCARGTYYYGTRVFDYWGQGTLVTVSSASTKGPSVFPLAPSSKSTSGGTAALGCLVKDYFPEPVTVSWNSGALTSGVHTFPAVLQSSGLYSLSSVVTVPSSSLGTQTYICNVNHKPSNTKVDKKVEPKSCGGGGSGGGGSEVQLVESGGGLVQPGGSLRLSCAASGFTFSTYAMNWVRQAPGKGLEWVGRIRSKYNNYATYYADSVKGRFTISRDDSKNTLYLQMNSLRAEDTAVYYCVRHGNFGDSYVSWFAYWGQGTLVTVSSGKPGSGKPGSGKPGSGKPGSQAVVTQEPSLTVSPGGTVTLTCGSSTGAVTTSNYANWVQQKPGKSPRGLIGGTNKRAPGVPARFSGSLLGGKAALTISGAQPEDEADYYCALWYSNHWVFGGGTKLTVLGGGGSGGGGSKTHTCPPCPAPPVAGPSVFLFPPKPKDTLMISRTPEVTCVVVDVKHEDPEVKFNWYVDGVEVHNAKTKPREEQYNSTYRVVSVLTVLHQDWLNGKEYKCKVSNKALPAPIEKTISKAKGQPREPQVYTLPPSREQMTKNQVKLTCLVKGFYPSDIAVEWESNGQPENNYKTTPPVLDSDGSFFLYSKLTVDKSRWQQGNVFSCSVMHEALHNHYTQKSLSLSPGK

SEQ ID NO: 250 - protein, 120 aa, Synthetic construct
EVQLVETGGGLVQPKGSLKLSCAASGFTFNTNAMNWVRQAPGKGLEWVARIRSKSNNYATYYADSVKDRFTISRDDTQSMIYLQMNNLKTEDTGMYYCVRGGSYWYFDVWGAGTTVTVSS

SEQ ID NO: 251 - protein, 117 aa, Synthetic construct
EVQLQESGGGLVQPKGSLKLSCAASGFSFNTYAMNWVRQAPGKGLEWVARIRSKSNNYATYYADSVKDRFTISRDDSESMLYLQMNNLKTEDTAMYYCVRLGAMDYWGQGTSVTVSS

SEQ ID NO: 252 - protein, 116 aa, Synthetic construct
EVQLVESGGGLVQPGGSLRLSCAASGFTFSDAWMDWVRQAPGKGLEWVGEIRSKPNNHATYYAESVKGRFTISRDDSKNSLYLQMNSLKTEDTAVYYCARTGTSYWGQGTLVTVSS

SEQ ID NO: 253 - protein, 124 aa, Synthetic construct
EVQLVESGGGLVRPEGSLRLSCAASGFTFNTYAMNWVRQAPGKGLEWVGRIRSKINNYATYYAESVKGRFTLSRDDSLSMVYLQMNSLKNEDTAMYYCVRHETLRSGISWFASWGQGTLVTVSS

SEQ ID NO: 254 - protein, 124 aa, Synthetic construct
EVQLVDSGGGLVQPKGSLKLSCAASGFTFNTYAMNWVRQAPGKGLEWVARIRSKSNNYATYYADSVKDRFTISRDDSQSRLYLQMNNLKTEDTAMYYCVRHETLRSGISWFANWGQGTLVTVSS

SEQ ID NO: 255 - protein, 124 aa, Synthetic construct
EVQLVESGGGLVKPGGSLRLSCAASGFTFSTYAMNWVRQAPGKGLEWVGRIRSKINNYATYYAESVKGRFTISRDDSKNTLYLQMNSLKTEDTAVYYCVRHETLRSGISWFASWGQGTLVTVSS

SEQ ID NO: 256 - protein, 124 aa, Synthetic construct
EVQLVESGGGLVKPGGSLRLSCAASGFTFNTYAMNWVRQAPGKGLEWVGRIRSKINNYATYYAESVKGRFTISRDDSKNTLYLQMNSLKTEDTAVYYCVRHETLRSGISWFASWGQGTLVTVSS

SEQ ID NO: 257 - protein, 124 aa, Synthetic construct
EVQLVESGGGLVKPGGSLRLSCAASGFTFSTYAMNWVRQAPGKGLEWVGRIRSHINNYATYYAESVKGRFTISRDDSKNTLYLQMNSLKTEDTAVYYCVRHETLRSGISWFASWGQGTLVTVSS

SEQ ID NO: 258 - protein, 124 aa, Synthetic construct
EVQLVESGGGLVKPGGSLRLSCAASGFTFSTYAMNWVRQAPGKGLEWVGRIRSKYNNYATYYAESVKGRFTISRDDSKNTLYLQMNSLKTEDTAVYYCVRHETLRSGISWFASWGQGTLVTVSS

SEQ ID NO: 259 - protein, 124 aa, Synthetic construct
EVQLVESGGGLVKPGGSLRLSCAASGFTFSTYAMNWVRQAPGKGLEWVGRERSKINNYATYYAESVKGRFTISRDDSKNTLYLQMNSLKTEDTAVYYCVRHETLRSGISWFASWGQGTLVTVSS

SEQ ID NO: 260 - protein, 124 aa, Synthetic construct
EVQLVESGGGLVKPGGSLRLSCAASGFTFSTYAMNWVRQAPGKGLEWVGRIRSKINNYKTYYAESVKGRFTISRDDSKNTLYLQMNSLKTEDTAVYYCVRHETLRSGISWFASWGQGTLVTVSS

SEQ ID NO: 261 - protein, 123 aa, Synthetic construct
  VARIANT 120: note = X can be any amino acid
EVQLVETGGGLVQPKGSLKLSCAASGFTFNTNAMNWVRQAPGKGLEWVARIRSKSNNYATYYADSVKDRFSISRDDSQNMLSLQMNNLKTEDTAIYYCVTEHYDYDYYVMDYWGQGTSVXSPQ

SEQ ID NO: 262 - protein, 125 aa, Synthetic construct
EVQLVESGGGLVQPGGSLKLSCAASGFTFNIYAMNWVRQAPGKGLEWVARIRSKYNNYATYYADSVKSRFTISRDDSKNTAYLQMNNLKTEDTAVYYCVRHGNFGNSYVSFFAYWGQGTLVTVSS

SEQ ID NO: 263 - protein, 125 aa, Synthetic construct
EVQLLESGGGLVQPGGSLKLSCAASGFTFNIYAMNWVRQAPGKGLEWVARIRSKYNNYATYYADSVKSRFTISRDDSKNTAYLQMNNLKTEDTAVYYCVRHGNFGNSYVSFFAYWGQGTLVTVSS

SEQ ID NO: 264 - protein, 125 aa, Synthetic construct
EVQLVESGGGLVQPGGSLKLSCAASGFTFNKYAMNWVRQAPGKGLEWVARIRSKYNNYATYYADSVKDRFTISRDDSKNTAYLQMNNLKTEDTAVYYCVRHGNFGNSYISYWAYWGQGTLVTVSS

SEQ ID NO: 265 - protein, 125 aa, Synthetic construct
EVQLLESGGGLVQPGGSLKLSCAASGFTFNKYAMNWVRQAPGKGLEWVARIRSKYNNYATYYADSVKDRFTISRDDSKNTAYLQMNNLKTEDTAVYYCVRHGNFGNSYISYWAYWGQGTLVTVSS

SEQ ID NO: 266 - protein, 125 aa, Synthetic construct
EVQLVESGGGLEQPGGSLKLSCAASGFTFNSYAMNWVRQAPGKGLEWVARIRSKYNNYATYYADSVKGRFTISRDDSKNTAYLQMNNLKTEDTAVYYCVRHGNFGNSYLSFWAYWGQGTLVTVSS

SEQ ID NO: 267 - protein, 125 aa, Synthetic construct
EVQLLESGGGLEQPGGSLKLSCAASGFTFNSYAMNWVRQAPGKGLEWVARIRSKYNNYATYYADSVKGRFTISRDDSKNTAYLQMNNLKTEDTAVYYCVRHGNFGNSYLSFWAYWGQGTLVTVSS

SEQ ID NO: 268 - protein, 125 aa, Synthetic construct
EVQLVESGGGLVQPGGSLKLSCAASGFTFNRYAMNWVRQAPGKGLEWVARIRSKYNNYATYYADSVKGRFTISRDDSKNTAYLQMNNLKTEDTAVYYCVRHGNFGNSYLSYFAYWGQGTLVTVSS

SEQ ID NO: 269 - protein, 125 aa, Synthetic construct
EVQLLESGGGLVQPGGSLKLSCAASGFTFNRYAMNWVRQAPGKGLEWVARIRSKYNNYATYYADSVKGRFTISRDDSKNTAYLQMNNLKTEDTAVYYCVRHGNFGNSYLSYFAYWGQGTLVTVSS

SEQ ID NO: 270 - protein, 125 aa, Synthetic construct
EVQLVESGGGLVQPGGSLKLSCAASGFTFNVYAMNWVRQAPGKGLEWVARIRSKYNNYATYYADSVKKRFTISRDDSKNTAYLQMNNLKTEDTAVYYCVRHGNFGNSYLSWWAYWGQGTLVTVSS

SEQ ID NO: 271 - protein, 125 aa, Synthetic construct
EVQLLESGGGLVQPGGSLKLSCAASGFTFNVYAMNWVRQAPGKGLEWVARIRSKYNNYATYYADSVKKRFTISRDDSKNTAYLQMNNLKTEDTAVYYCVRHGNFGNSYLSWWAYWGQGTLVTVSS

SEQ ID NO: 272 - protein, 125 aa, Synthetic construct
EVQLVESGGGLVQPGGSLKLSCAASGFTFNKYAMNWVRQAPGKGLEWVARIRSKYNNYATYYADSVKSRFTISRDDSKNTAYLQMNNLKTEDTAVYYCVRHGNFGNSYTSYYAYWGQGTLVTVSS

SEQ ID NO: 273 - protein, 125 aa, Synthetic construct
EVQLLESGGGLVQPGGSLKLSCAASGFTFNKYAMNWVRQAPGKGLEWVARIRSKYNNYATYYADSVKSRFTISRDDSKNTAYLQMNNLKTEDTAVYYCVRHGNFGNSYTSYYAYWGQGTLVTVSS

SEQ ID NO: 274 - protein, 125 aa, Synthetic construct
EVQLVESGGGLVQPGGSLKLSCAASGFTFNGYAMNWVRQAPGKGLEWVARIRSKYNNYATYYADSVKERFTISRDDSKNTAYLQMNNLKTEDTAVYYCVRHRNFGNSYLSWFAYWGQGTLVTVSS

SEQ ID NO: 275 - protein, 125 aa, Synthetic construct
EVQLLESGGGLVQPGGSLKLSCAASGFTFNGYAMNWVRQAPGKGLEWVARIRSKYNNYATYYADSVKERFTISRDDSKNTAYLQMNNLKTEDTAVYYCVRHRNFGNSYLSWFAYWGQGTLVTVSS

SEQ ID NO: 276 - protein, 125 aa, Synthetic construct
EVQLVESGGGLVQPGGSLKLSCAASGFTFNVYAMNWVRQAPGKGLEWVARIRSKYNNYATYYADSVKKRFTISRDDSKNTAYLQMNNLKTEDTAVYYCVRHGNFGNSYISWWAYWGQGTLVTVSS

SEQ ID NO: 277 - protein, 125 aa, Synthetic construct
EVQLLESGGGLVQPGGSLKLSCAASGFTFNVYAMNWVRQAPGKGLEWVARIRSKYNNYATYYADSVKKRFTISRDDSKNTAYLQMNNLKTEDTAVYYCVRHGNFGNSYISWWAYWGQGTLVTVSS

SEQ ID NO: 278 - protein, 125 aa, Synthetic construct
EVQLVESGGGLVQPGGSLKLSCAASGFTFNSYAMNWVRQAPGKGLEWVARIRSKYNNYATYYADSVKGRFTISRDDSKNTAYLQMNNLKTEDTAVYYCVRHGNFGNSYVSWWAYWGQGTLVTVSS

SEQ ID NO: 279 - protein, 125 aa, Synthetic construct
EVQLLESGGGLVQPGGSLKLSCAASGFTFNSYAMNWVRQAPGKGLEWVARIRSKYNNYATYYADSVKGRFTISRDDSKNTAYLQMNNLKTEDTAVYYCVRHGNFGNSYVSWWAYWGQGTLVTVSS

SEQ ID NO: 280 - protein, 129 aa, Synthetic construct
EVQLEVQLVESGGGLVQPGGSLKLSCAASGFTFNKYAMNWVRQAPGKGLEWVARIRSKYNNYATYYADSVKDRFTISRDDSKNTAYLQMNNLKTEDTAVYYCVRHGNFGNSYISYWAYWGQGTLVTVSS

SEQ ID NO: 281 - protein, 122 aa, Synthetic construct
EVQLVESGGGLVQPKGSLKLSCAASGFTFNTYAMNWVRQAPGKGLEWVARIRSKSNNYATYYADSVKDRFTISRDDSQSMLYLQMNNLKTEDTAMYYCVRHGEYGNPWFAYWGQGTLVTVSA

SEQ ID NO: 282 - protein, 115 aa, Synthetic construct
EVQLVESGGGLVQPGGSLRLSCAASGFTFSNYWMNWVRQAPEKGLEWVADIRLKSNNYATHYAESVKGRFTISRDDAKSSLYLQMNNLRAEDTAVYYCVRDGPYWGQGTLVTVSA

SEQ ID NO: 283 - protein, 125 aa, Synthetic construct
EVQLVESGGGLVQPGGSLRLSCAASGFTFNSYAMNWVRQAPGKGLEWVARIRSKYNNYATYYADSVKGRFTISRDDSKNTAYLQMNSLKTEDTAVYYCVRHGNFGNSYVSWWAYWGQGTLVTVSS

SEQ ID NO: 284 - protein, 113 aa, Synthetic construct
VQLVESGGGLVQPGGSLRLSCAASGFTFNTYWMNWVRQAPGKGLEWVGQIRLKSNNYATHYAESVKGRFTISRDDSKNSLYLQMNSLKTEDTAVYYCTPVDFWGQGTTVTVSS

SEQ ID NO: 285 - protein, 114 aa, Synthetic construct
EVQLVESGGGLVQPGGSLRLSCAASGFTFNTYWMNWVRQAPGKGLEWVGQIRLKSNNYATHYAESVKGRFTISRDDSKNSLYLQMNSLKTEDTAVYYCTPVDFWGQGTTVTVSS

SEQ ID NO: 286 - protein, 125 aa, Synthetic construct
EVQLVESGGGLVQPGGSLRLSCAASGFTFSTYAMNWVRQAPGKGLEWVGRIRSKYNNYATYYADSVKDRFTISRDDSKNSLYLQMNSLKTEDTAVYYCARHGNFGNSYVSWFAYWGQGTLVTVSS

SEQ ID NO: 287 - protein, 125 aa, Synthetic construct
EVQLVESGGGLVQPGGSLRLSCAASGFTFSTYAMNWVRQAPGKGLEWVGRIRSKYNNYATYYADSVKDRFTISRDDSKNSLYLQMNSLKTEDTAVYYCARHGNFGNSYVSYFAYWGQGTLVTVSS

SEQ ID NO: 288 - protein, 125 aa, Synthetic construct
EVQLVESGGGLVQPGGSLRLSCAASGFTFSTYAMNWVRQAPGKGLEWVGRIRSKYNNYATYYADSVKDRFTISRDDSKNSLYLQMNSLKTEDTAVYYCARHGNFGNSYVSHFAYWGQGTLVTVSS

SEQ ID NO: 289 - protein, 125 aa, Synthetic construct
EVQLVESGGGLVQPKGSLKLSCAASGFTFNTYAMNWVRQAPGKGLEWVARIRSKYNNYATYYADSVKDRFTISRDDSQSILYLQMNNLKTEDTAMYYCVRHGNFGNSYVSWFAYWGQGTLVTVSS

SEQ ID NO: 290 - protein, 129 aa, Synthetic construct
EVQLEVQLVESGGGLVQPGGSLRLSCAASGFTFSTYAMNWVRQAPGKGLEWVGRIRSKYNNYATYYADSVKDRFTISRDDSKNSLYLQMNSLKTEDTAVYYCARHGNFGNSYVSYFAYWGQGTLVTVSS

SEQ ID NO: 291 - protein, 129 aa, Synthetic construct
EVQLEVQLVESGGGLVQPGGSLRLSCAASGFTFSTYAMNWVRQAPGKGLEWVGRIRSKYNNYATYYADSVKDRFTISRDDSKNSLYLQMNSLKTEDTAVYYCARHGNFGNSYVSHFAYWGQGTLVTVSS

SEQ ID NO: 292 - protein, 129 aa, Synthetic construct
EVQLEVQLVESGGGLVQPKGSLKLSCAASGFTFNTYAMNWVRQAPGKGLEWVARIRSKYNNYATYYADSVKDRFTISRDDSQSILYLQMNNLKTEDTAMYYCVRHGNFGNSYVSWFAYWGQGTLVTVSS

SEQ ID NO: 293 - protein, 129 aa, Synthetic construct
EVQLEVQLVESGGGLVQPGGSLRLSCAASGFTFSTYAMNWVRQAPGKGLEWVGRIRSKYNNYATYYADSVKDRFTISRDDSKNSLYLQMNSLKTEDTAVYYCARHGNFGNSYVSWFAYWGQGTLVTVSS

SEQ ID NO: 294 - protein, 125 aa, Synthetic construct
EVQLVESGGGLVQPGGSLKLSCAASGFTFNKYAINWVRQAPGKGLEWVARIRSKYNNYATYYADQVKDRFTISRDDSKNTAYLQMNNLKTEDTAVYYCVRHANFGNSYISYWAYWGQGTLVTVSS

SEQ ID NO: 295 - protein, 125 aa, Synthetic construct
EVQLVESGGGLVQPGGSLKLSCAASGFEFNKYAMNWVRQAPGKGLEWVARIRSKYNKYATYYADSVKDRFTISRDDSKNTAYLQMNNLKTEDTAVYYCVRHGNFGNSYISYWAYWGQGTLVTVSS

SEQ ID NO: 296 - protein, 125 aa, Synthetic construct
EVQLVESGGGLVQPGGSLKLSCAASGFTFNKYAMNWVRQAPGKGLEWVARIRSKYNNYATYYADSVKDRFTISRDDSKNTAYLQMNNLKTEDTAVYYCVRHGNFGNSHISYWAYWGQGTLVTVSS

SEQ ID NO: 297 - protein, 125 aa, Synthetic construct
EVQLVESGGGLVQPGGSLKLSCAASGFMFNKYAMNWVRQAPGKGLEWVARIRSKSNNYATYYADSVKDRFTISRDDSKNTAYLQMNNLKTEDTAVYYCVRHGNFGNSYISYWATWGQGTLVTVSS

SEQ ID NO: 298 - protein, 125 aa, Synthetic construct
EVQLVESGGGLVQPGGSLKLSCAASGFTFNTYAMNWVRQAPGKGLEWVARIRSKYNNYATYYKDSVKDRFTISRDDSKNTAYLQMNNLKTEDTAVYYCVRHGNFGNSPISYWAYWGQGTLVTVSS

SEQ ID NO: 299 - protein, 125 aa, Synthetic construct
EVQLVESGGGLVQPGGSLKLSCAASGFTYNKYAMNWVRQAPGKGLEWVARIRSKYNNYATYYADEVKDRFTISRDDSKNTAYLQMNNLKTEDTAVYYCVRHGNFGNSPISYWAYWGQGTLVTVSS

SEQ ID NO: 300 - protein, 125 aa, Synthetic construct
EVQLVESGGGLVQPGGSLKLSCAASGNTFNKYAMNWVRQAPGKGLEWVARIRSKYNNYETYYADSVKDRFTISRDDSKNTAYLQMNNLKTEDTAVYYCVRHTNFGNSYISYWAYWGQGTLVTVSS

SEQ ID NO: 301 - protein, 125 aa, Synthetic construct
EVQLVESGGGLVQPGGSLKLSCAASGFTFNNYAMNWVRQAPGKGLEWVARIRSKYNNYATYYADAVKDRFTISRDDSKNTAYLQMNNLKTEDTAVYYCVRHGNFGNSQISYWAYWGQGTLVTVSS

SEQ ID NO: 302 - protein, 125 aa, Synthetic construct
EVQLVESGGGLVQPGGSLKLSCAASGFTFNKYAVNWVRQAPGKGLEWVARIRSKYNNYATYYADSVKDRFTISRDDSKNTAYLQMNNLKTEDTAVYYCVRHGNFGNSYISYWAYWGQGTLVTVSS

SEQ ID NO: 303 - protein, 125 aa, Synthetic construct
EVQLVESGGGLVQPGGSLKLSCAASGFTFNKYPMNWVRQAPGKGLEWVARIRSKYNNYATYYADSVKDRFTISRDDSKNTAYLQMNNLKNEDTAVYYCVRHGNFNNSYISYWAYWGQGTLVTVSS

SEQ ID NO: 304 - protein, 125 aa, Synthetic construct
EVQLVESGGGLVQPGGSLKLSCAASGFTFNGYAMNWVRQAPGKGLEWVARIRSKYNNYATYYADEVKDRFTISRDDSKNTAYLQMNNLKTEDTAVYYCVRHGNFGNSPISYWAYWGQGTLVTVSS

SEQ ID NO: 305 - protein, 125 aa, Synthetic construct
EVQLVESGGGLVQPGGSLKLSCAASGNTFNKYAMNWVRQAPGKGLEWVARIRSKYNNYATYYADSVKDRFTISRDDSKNTAYLQMNNLKTEDTAVYYCVRHGNFGDSYISYWAYWGQGTLVTVSS

SEQ ID NO: 306 - protein, 125 aa, Synthetic construct
EVQLVESGGGLVQPGGSLKLSCAASGFTFNNYAMNWVRQAPGKGLEWVARIRSGYNNYATYYADSVKDRFTISRDDSKNTAYLQMNNLKTEDTAVYYCVRHGNFGNSYISYWAYWGQGTLVTVSS

SEQ ID NO: 307 - protein, 125 aa, Synthetic construct
EVQLVESGGGLVQPGGSLKLSCAASGFEFNKYAMNWVRQAPGKGLEWVARIRSKYNNYETYYADSVKDRFTISRDDSKNTAYLQMNNLKTEDTAVYYCVRHGNFGNSLISYWAYWGQGTLVTVSS

SEQ ID NO: 308 - protein, 125 aa, Synthetic construct
EVQLVESGGGLVQPGGSLKLSCAASGFTFNKYALNWVRQAPGKGLEWVARIRSKYNNYATEYADSVKDRFTISRDDSKNTAYLQMNNLKTEDTAVYYCVRHGNFGNSPISYWAYWGQGTLVTVSS

SEQ ID NO: 309 - protein, 125 aa, Synthetic construct
EVQLVESGGGLVQPGGSLKLSCAASGFTFNEYAMNWVRQAPGKGLEWVARIRSKYNNYATYYADDVKDRFTISRDDSKNTAYLQMNNLKTEDTAVYYCVRHGNFGNSGISYWAYWGQGTLVTVSS

SEQ ID NO: 310 - protein, 124 aa, Synthetic construct
QVKLQESGGGLVQPKGSLKLSCAASGFTFNTYAMNWVRQAPGKGLEWVARIRSKSNNYATFYADSVKDRFTISRDDSQSMLYLQMHNLKTDDTAMYYCVRPSIYYYASGYLDVWGAGTTVTVSS

SEQ ID NO: 311 - protein, 123 aa, Synthetic construct
QVKLQESGGGLVQPKGSLKLSCAASGFTFMTYAMNWVRQAPGKGLEWVARIRSKSNNVATFYAPSVKDRFNSRDDSQSMLYIAMHNLKTDPTAMYYCVRPSLYYYASGYLPVWGAGTTVTVSS

SEQ ID NO: 312 - protein, 125 aa, Synthetic construct
EVQLVESGGGLVQPGGSLRLSCAASGFTFNTYAMNWVRQAPGKGLEWVARIRSKYNNYATYYAASVKGRFTISRDDSKNSLYLQMNSLKTEDTAVYYCARHGNFGNSYVSWFAYWGQGTLVTVSS

SEQ ID NO: 313 - protein, 123 aa, Synthetic construct
EVMLVESGGGLVQPKGSLKLSCAASGFTFNNYAMNWVRQAPGKGLEWVARIRSKSNNYATFYADSVKDRFTISRDDSQSMLYLQMNNLKTEDTAMYYCVRRGASGIDYAMDYWGQGTSLTVSS

SEQ ID NO: 314 - protein, 125 aa, Synthetic construct
EVQLVESGGGLVQPKGSLKLSCAASGFTFNTYAMNWVRQAPGKGLEWVARIRSKYNNYATYYADSVKDRFTISRDDSQSILYLQMNNLKTEDTAMYYCVRHGNFGNSYVSWFAYWGQGTLVTVSA

SEQ ID NO: 315 - protein, 125 aa, Synthetic construct
EVQLLESGGGLVQPGGSLRLSCAASGFTFSTYAMNWVRQAPGKGLEWVSRIRSKYNNYATYYADSVKGRFTISRDDSKNTLYLQMNSLRAEDTAVYYCVRHGNFGNSYVSWFAYWGQGTLVTVSS

SEQ ID NO: 316 - protein, 125 aa, Synthetic construct
EVQLLESGGGLVQPGGSLRLSCAASGFTFSTYAMNWVRQAPGKGLEWVSRIRSKYNNYATYYADSVKGRFTISRDDSKNTLYLQMNSLRAEDTAVYYCARHGNFGNSYVSWFAYWGQGTLVTVSS

SEQ ID NO: 317 - protein, 125 aa, Synthetic construct
EVQLLESGGGLVQPGGSLRLSCAASGFTFSTYAMNWVRQAPGKGLEWVSRIRSKYNNYATYYADSVKGRFTISRDDSKNTLYLQMNSLRAEDTAVYYCAKHGNFGNSYVSWFAYWGQGTLVTVSS

SEQ ID NO: 318 - protein, 121 aa, Synthetic construct
EVQLVESGGGLVHPQGSLKLSCTASGFTFNTYDMNWVRQAPGKGLEWVARIRTKSYYYATYYADSVKDRFTISRDDSQTMLYLQLNNLKTEDTALYYCVRRSGNYGAMDYWGQGTSVTVSS

SEQ ID NO: 319 - protein, 123 aa, Synthetic construct
EVQLVESGGGLVQPGGSLRLSCAASGFTFSDHYMDWVRQAPGKGLEWVGRTRNKANSYTTEYAASVKGRFTISRDDSKNSLYLQMNSLKTEDTAVYYCARGGYSYGYDYFDYWGQGTLVTVSS

SEQ ID NO: 320 - protein, 123 aa, Synthetic construct
EVQLVESGGGLVQPGGSLKLSCAASGFTFSGSAMHWVRQASGKGLEWVGRIRSKANSYATAYAASVKGRFTISRDDSKNTAYLQMNSLKTEDTAVYYCTRRYNWNDDNWFDSWGQGTLVTVSS

SEQ ID NO: 321 - protein, 128 aa, Synthetic construct
EVQLVESGGGLVQPGGSLKLSCAASGFTFSGSAMHWVRQASGKGLEWVGRIRSKANSYATAYAASVKGRFTISRDDSKNTAYLQMNSLKTEDTAVYYCTRQGYCTNGVCYTYWYFDLWGRGTLVTVSS

SEQ ID NO: 322 - protein, 127 aa, Synthetic construct
EVQLVESGGGLVQPGGSLKLSCAASGFTFSGSAMHWVRQASGKGLEWVGRIRSKANSYATAYAASVKGRFTISRDDSKNTAYLQMNSLKTEDTAVYYCTRQYYYDSSGYYYDYFDYWGQGTLVTVSS

SEQ ID NO: 323 - protein, 124 aa, Synthetic construct
EVQLVESGGGLVQPGGSLKLSCAASGFTFSGSAMHWVRQASGKGLEWVGRIRSKANSYATAYAASVKGRFTISRDDSKNTAYLQMNSLKTEDTAVYYCTRHDYGGNSDNWFDSWGQGTLVTVSS

SEQ ID NO: 324 - protein, 124 aa, Synthetic construct
EVQLVESGGGLVQPGGSLKLSCAASGFTFSGSAMHWVRQASGKGLEWVGRIRSKANSYATAYAASVKGRFTISRDDSKNTAYLQMNSLKTEDTAVYYCTRRGYSGYDYDYFDYWGQGTLVTVSS

SEQ ID NO: 325 - protein, 125 aa, Synthetic construct
EVQLVESGGGLVQPGGSLKLSCAASGFTFSGSAMHWVRQASGKGLEWVGRIRSKANSYATAYAASVKGRFTISRDDSKNTAYLQMNSLKTEDTAVYYCTRQGYSSGWYAEYFQHWGQGTLVTVSS

SEQ ID NO: 326 - protein, 121 aa, Synthetic construct
EVQLVESGGGLVQPGGSLKLSCAASGFTFSGSAMHWVRQASGKGLEWVGRIRSKANSYATAYAASVKGRFTISRDDSKNTAYLQMNSLKTEDTAVYYCTRPNWGDNWFDSWGQGTLVTVSS

SEQ ID NO: 327 - protein, 120 aa, Synthetic construct
EVQLVESGGGLVQPKGSLKLSCAASGFTFNTYAMNWVRQAPGKGLEWVARIRSKSNNYAAYFADSVKDRFTISRDDSQTMLYLQMNNLKSEDTAMYYCVSGGNYVPFAYWGQGTLVTVSA

SEQ ID NO: 328 - protein, 125 aa, Synthetic construct
EVQLVESGGGLVQPGGSLRLSCAASGFTFNTYAMNWVRQAPGKGLEWVGRIRSKYNNYATYYADSVKGRFTISRDDSKNTLYLQMNSLRAEDTAVYYCVRHGNFGNSYVSWFAYWGQGTLVTVSS

SEQ ID NO: 329 - protein, 125 aa, Synthetic construct
EVQLVESGGGDVQPGGSLRLSCAASGFTFNTYAMNWVRQAPGKGLEWVGRIRSKYNNYATYYADSVKGRFTISRDDSKNTLYLQMNSLRAEDTAVYYCVRHGNFGNSYVSWFAYWGQGTLVTVSS

SEQ ID NO: 330 - protein, 125 aa, Synthetic construct
EVQLVESGGGKVQPGGSLRLSCAASGFTFNTYAMNWVRQAPGKGLEWVGRIRSKYNNYATYYADSVKGRFTISRDDSKNTLYLQMNSLRAEDTAVYYCVRHGNFGNSYVSWFAYWGQGTLVTVSS

SEQ ID NO: 331 - protein, 125 aa, Synthetic construct
EVQLVESGGGNVQPGGSLRLSCAASGFTFNTYAMNWVRQAPGKGLEWVGRIRSKYNNYATYYADSVKGRFTISRDDSKNTLYLQMNSLRAEDTAVYYCVRHGNFGNSYVSWFAYWGQGTLVTVSS

SEQ ID NO: 332 - protein, 125 aa, Synthetic construct
EVQLVESGGGSVQPGGSLRLSCAASGFTFNTYAMNWVRQAPGKGLEWVGRIRSKYNNYATYYADSVKGRFTISRDDSKNTLYLQMNSLRAEDTAVYYCVRHGNFGNSYVSWFAYWGQGTLVTVSS

SEQ ID NO: 333 - protein, 125 aa, Synthetic construct
EVQLVESGGGLVQPGGSLKLSCAASGFTFNTYAMNWVRQAPGKGLEWVGRIRSKYNNYATYYADSVKGRFTISRDDSKNTLYLQMNSLRAEDTAVYYCVRHGNFGNSYVSWFAYWGQGTLVTVSS

SEQ ID NO: 334 - protein, 125 aa, Synthetic construct
EVQLVESGGGLVQPGGSLRLSCAASGFTFSTYAMNWVRQAPGKGLEWVGRIRSKYNNYATYYADSVKGRFTISRDDSKNTLYLQMNSLRAEDTAVYYCVRHGNFGNSYVSWFAYWGQGTLVTVSS

SEQ ID NO: 335 - protein, 125 aa, Synthetic construct
EVQLVESGGGLVQPGGSLRLSCAASGFTFNTYAMHWVRQAPGKGLEWVGRIRSKYNNYATYYADSVKGRFTISRDDSKNTLYLQMNSLRAEDTAVYYCVRHGNFGNSYVSWFAYWGQGTLVTVSS

SEQ ID NO: 336 - protein, 125 aa, Synthetic construct
EVQLVESGGGLVQPGGSLRLSCAASGFTFNTYAMSWVRQAPGKGLEWVGRIRSKYNNYATYYADSVKGRFTISRDDSKNTLYLQMNSLRAEDTAVYYCVRHGNFGNSYVSWFAYWGQGTLVTVSS

SEQ ID NO: 337 - protein, 125 aa, Synthetic construct
EVQLVESGGGLVQPGGSLRLSCAASGFTFNTYAMNWVRQASGKGLEWVGRIRSKYNNYATYYADSVKGRFTISRDDSKNTLYLQMNSLRAEDTAVYYCVRHGNFGNSYVSWFAYWGQGTLVTVSS

SEQ ID NO: 338 - protein, 125 aa, Synthetic construct
EVQLVESGGGLVQPGGSLRLSCAASGFTFNTYAMNWVRQAPGKGLEWVGRIRSKANNYATYYADSVKGRFTISRDDSKNTLYLQMNSLRAEDTAVYYCVRHGNFGNSYVSWFAYWGQGTLVTVSS

SEQ ID NO: 339 - protein, 125 aa, Synthetic construct
EVQLVESGGGLVQPGGSLRLSCAASGFTFNTYAMNWVRQAPGKGLEWVGRIRSKANSYATYYADSVKGRFTISRDDSKNTLYLQMNSLRAEDTAVYYCVRHGNFGNSYVSWFAYWGQGTLVTVSS

SEQ ID NO: 340 - protein, 125 aa, Synthetic construct
EVQLVESGGGLVQPGGSLRLSCAASGFTFNTYAMNWVRQAPGKGLEWVGRIRSKYNNYATAYADSVKGRFTISRDDSKNTLYLQMNSLRAEDTAVYYCVRHGNFGNSYVSWFAYWGQGTLVTVSS

SEQ ID NO: 341 - protein, 125 aa, Synthetic construct
EVQLVESGGGLVQPGGSLRLSCAASGFTFNTYAMNWVRQAPGKGLEWVGRIRSKYNNYATYYAASVKGRFTISRDDSKNTLYLQMNSLRAEDTAVYYCVRHGNFGNSYVSWFAYWGQGTLVTVSS

SEQ ID NO: 342 - protein, 125 aa, Synthetic construct
EVQLVESGGGLVQPGGSLRLSCAASGFTFNTYAMNWVRQAPGKGLEWVGRIRSKYNNYATYYADSVKGRFTISRDNSKNTLYLQMNSLRAEDTAVYYCVRHGNFGNSYVSWFAYWGQGTLVTVSS

SEQ ID NO: 343 - protein, 125 aa, Synthetic construct
EVQLVESGGGLVQPGGSLRLSCAASGFTFNTYAMNWVRQAPGKGLEWVGRIRSKYNNYATYYADSVKGRFTISRDTSKNTLYLQMNSLRAEDTAVYYCVRHGNFGNSYVSWFAYWGQGTLVTVSS

SEQ ID NO: 344 - protein, 125 aa, Synthetic construct
EVQLVESGGGLVQPGGSLRLSCAASGFTFNTYAMNWVRQAPGKGLEWVGRIRSKYNNYATYYADSVKGRFTISRDDSKNTAYLQMNSLRAEDTAVYYCVRHGNFGNSYVSWFAYWGQGTLVTVSS

SEQ ID NO: 345 - protein, 125 aa, Synthetic construct
EVQLVESGGGLVQPGGSLRLSCAASGFTFNTYAMNWVRQAPGKGLEWVGRIRSKYNNYATYYADSVKGRFTISRDDSKNTLYLQMNSLRDEDTAVYYCVRHGNFGNSYVSWFAYWGQGTLVTVSS

SEQ ID NO: 346 - protein, 125 aa, Synthetic construct
EVQLVESGGGLVQPGGSLRLSCAASGFTFNTYAMNWVRQAPGKGLEWVGRIRSKYNNYATYYADSVKGRFTISRDDSKNTLYLQMNSLRKEDTAVYYCVRHGNFGNSYVSWFAYWGQGTLVTVSS

SEQ ID NO: 347 - protein, 125 aa, Synthetic construct
EVQLVESGGGLVQPGGSLRLSCAASGFTFNTYAMNWVRQAPGKGLEWVGRIRSKYNNYATYYADSVKGRFTISRDDSKNTLYLQMNSLRSEDTAVYYCVRHGNFGNSYVSWFAYWGQGTLVTVSS

SEQ ID NO: 348 - protein, 125 aa, Synthetic construct
EVQLVESGGGLVQPGGSLRLSCAASGFTFNTYAMNWVRQAPGKGLEWVGRIRSKYNNYATYYADSVKGRFTISRDDSKNTLYLQMNSLRAEDTAVYYCARHGNFGNSYVSWFAYWGQGTLVTVSS

SEQ ID NO: 349 - protein, 125 aa, Synthetic construct
EVQLVESGGGLVQPGGSLRLSCAASGFTFNTYAMNWVRQAPGKGLEWVGRIRSKYNNYATYYADSVKGRFTISRDDSKNTLYLQMNSLRAEDTAVYYCTRHGNFGNSYVSWFAYWGQGTLVTVSS

SEQ ID NO: 350 - protein, 125 aa, Synthetic construct
EVQLVESGGGLVQPGGSLRLSCAASGFTFNTYAMNWVRQAPGKGLEWVGRIRSKYNNYATYYADSVKGRFTISRDDSKNTLYLQMNSLRAEDTAVYYCVRHGNFGDSYVSWFAYWGQGTLVTVSS

SEQ ID NO: 351 - protein, 125 aa, Synthetic construct
EVQLVESGGGLVQPGGSLRLSCAASGFTFNTYAMNWVRQAPGKGLEWVGRIRSKYNNYATYYADSVKGRFTISRDDSKNTLYLQMNSLRAEDTAVYYCVRHGNFGQSYVSWFAYWGQGTLVTVSS

SEQ ID NO: 352 - protein, 125 aa, Synthetic construct
EVQLVESGGGLVQPGGSLRLSCAASGFTFNTYAMNWVRQAPGKGLEWVGRIRSKYNNYATYYADSVKGRFTISRDDSKNTLYLQMNSLRAEDTAVYYCVRHGNFGNTYVSWFAYWGQGTLVTVSS

SEQ ID NO: 353 - protein, 125 aa, Synthetic construct
EVQLVESGGGLVQPGGSLRLSCAASGFTFNTYAMNWVRQAPGKGLEWVGRIRSKYNNYATYYADSVKGRFTISRDDSKNTLYLQMNSLRAEDTAVYYCVRHGNFGNSYVSWFDYWGQGTLVTVSS

SEQ ID NO: 354 - protein, 125 aa, Synthetic construct
EVQLVESGGGLVQPGGSLRLSCAASGFTFNTYAMNWVRQAPGKGLEWVGRIRSKYNNYATYYADSVKGRFTISRDDSKNTLYLQMNSLRAEDTAVYYCVRHGNFGNSYVSWFAYWGQGTTVTVSS

SEQ ID NO: 355 - protein, 125 aa, Synthetic construct
EVQLVESGGGLVQPGGSLRLSCAASGFTFNTYAMNWVRQAPGKSLEWVGRIRSKYNNYATYYADSVKGRFTISRDDSKNTLYLQMNSLRAEDTAVYYCVRHGNFGNSYVSWFAYWGQGTLVTVSS

SEQ ID NO: 356 - protein, 125 aa, Synthetic construct
EVQLVESGGGLVQPGGSLRLSCAASGFTFNTYAMNWVRQAPGKGLEWVGRIRSKYNNYATYYADSVKGRFTISRDDSKNTLYLQMNSLRAEDTATYYCVRHGNFGNSYVSWFAYWGQGTLVTVSS

SEQ ID NO: 357 - protein, 125 aa, Synthetic construct; identical to SEQ ID NO: 155

SEQ ID NO: 358 - protein, 125 aa, Synthetic construct; identical to SEQ ID NO: 171

SEQ ID NO: 359 - protein, 125 aa, Synthetic construct; identical to SEQ ID NO: 159

SEQ ID NO: 360 - protein, 125 aa, Synthetic construct; identical to SEQ ID NO: 169

SEQ ID NO: 361 - protein, 125 aa, Synthetic construct
EVQLVESGGGLVQPGGSLRLSCAASGFTFSTYAMSWVRQAPGKGLEWVGRIRSKANNYATYYADSVKGRFTISRDDSKNTLYLQMNSLRAEDTAVYYCVRHGNFGDSYVSWFDYWGQGTLVTVSS

SEQ ID NO: 362 - protein, 125 aa, Synthetic construct
EVQLVESGGEVKKPGESLRLSCAASGFTFNTYAMNWVRQAPGKGLEWVGRIRSKYNNYATYYADSVKGRFTISRDDSKNTLYLQMNSLRAEDTAVYYCVRHGNFGNSYVSWFAYWGQGTLVTVSS

SEQ ID NO: 363 - protein, 123 aa, Synthetic construct
EVQLVESGGGLVQPGGSLRLSCAASGFTFNTYAMNWVRQAPGKGLEWVGRIRSNGGSTYYADSVKGRFTISRDDSKNTLYLQMNSLRAEDTAVYYCVRHGNFGNSYVSWFAYWGQGTLVTVSS

SEQ ID NO: 364 - protein, 125 aa, Synthetic construct
EVQLVESGGGLVQPGGSLRLSCAASGFTFNTYAMNWVRKAPGKGLEWVGRIRSKYNNYATYYADSVKGRFTISRDDSKNTLYLQMNSLRAEDTAVYYCVRHGNFGNSYVSWFAYWGQGTLVTVSS

SEQ ID NO: 365 - protein, 125 aa, Synthetic construct
EVQLVESGGGLVQPGGSLRLSCAASGFTFSTYAMNWVRKAPGKGLEWVGRIRSKYNNYATYYADSVKGRFTISRDDSKNTLYLQMNSLRAEDTAVYYCVRHGNFGNSYVSWFAYWGQGTLVTVSS

SEQ ID NO: 366 - protein, 125 aa, Synthetic construct
EVQLVESGGGLVQPGGSLRLSCAASGFTFSTYAMNWVRKAPGKGLEWVGRIRSKYNNYATYYADSVKGRFTISRDDSKNTLYLQMNSLRAEDTAVYYCVRHGNFGDSYVSWFAYWGQGTLVTVSS

SEQ ID NO: 367 - protein, 125 aa, Synthetic construct
EVQLVESGGGLVQPGGSLRLSCAASGFTFSTYAMNWVRQAPGKCLEWVGRIRSKYNNYATYYADSVKGRFTISRDDSKNTLYLQMNSLRAEDTAVYYCVRHGNFGDSYVSWFAYWGQGTLVTVSS

SEQ ID NO: 368 - protein, 125 aa, Synthetic construct
EVQLVESGGGLVQPGGSLRLSCAASGFTFSTYAMNWVRQAPGKGLEWVGRIRSKYNNYATYYADSVKGRFTISRDDSKNTLYLQMNSLRAEDTAVYYCVRHGNFGDSYVSWFAYWGCGTLVTVSS

SEQ ID NO: 369 - protein, 125 aa, Synthetic construct
EVQLVESGGGLVQPGGSLRLSCAASGFTFSTYAMNWVRQAPGKGLEWVGRIRSKYNNYATYYADSVKGRFTISRDDSKNTLYLQMNSLRAEDTAVYYCVRHGNFGDSCVSWFAYWGQGTLVTVSS

SEQ ID NO: 370 - protein, 125 aa, Synthetic construct
EVQLVESGGGLVQPGGSLRLSCAASGFTFSTYAMNWVRQAPGKGLEWVGRIRSKYNNYATYYADSVKGRFTISRDDSKNTLYLQMNSLRAEDTAVYYCVRHGNFGCSYVSWFAYWGQGTLVTVSS

SEQ ID NO: 371 - protein, 125 aa, Synthetic construct
EVQLVESGGGLVQPGGSLRLSCAASGFTFSTYAMNWVRQAPGKGLEWVGRIRSKYNNYATYYADSVKGRFTISRDDSKNTLYLQMNSLRAEDTAVYYCVRHGNFGDSYVSWFCYWGQGTLVTVSS

SEQ ID NO: 372 - protein, 125 aa, Synthetic construct
EVQLVESGGGLVQPGGSLRLSCAASGFTFSTYAMNWVRCAPGKGLEWVGRIRSKYNNYATYYADSVKGRFTISRDDSKNTLYLQMNSLRAEDTAVYYCVRHGNFGDSYVSWFAYWGQGTLVTVSS

SEQ ID NO: 373 - protein, 125 aa, Synthetic construct
EVQLVESGGGLVQPGGSLRLSCAASGFTFSTYAMNWVRQAPGKGLEWVGRIRSKYNNYATYYADSVKGRFTISRDDSKNTLYLQMNSLRAEDTACYYCVRHGNFGDSYVSWFAYWGQGTLVTVSS

SEQ ID NO: 374 - protein, 125 aa, Synthetic construct
EVQLVESGGGLVQPGGSLRLSCAASGFTFSTYAMNWVRQAPGKGLEWVGRIRSKYNNYATYYADSVKGRFTISRDDSKNTLYLQMNSLRAEDTAVYYCVRHGNFGDSYCSWFAYWGQGTLVTVSS

SEQ ID NO: 375 - protein, 117 aa, Synthetic construct
EVQLVESGGGLVQPKGSLKLSCAVSAFTFTTYAMNWVRQAPGKGLEWVARIRNKSNNYATYYADSVKDRFTISRDDSQSMLYLQMNNLKIEDTAMYYCVFYYDYVYWGQGTLVTVSA

SEQ ID NO: 376 - protein, 117 aa, Synthetic construct
EVQLVETGGGLVQPKGSLKLSCAVSAFTFTTYAMNWVRQAPGKGLEWVARIRNKSNNYATYYADSVKDRFTISRDDSQSMLYLQMNNLKIEDTAMYYCVFYYDYVYWGQGTLVTVSA

SEQ ID NO: 377 - protein, 124 aa, Synthetic construct
EVQLVESGGGLVQPKGSLKLSCAASGFTFNTYAMNWVRQAPGKGLEWVARIRIKSNNYATYYADSVKDRFTISRDDSQNMLYLQMNNLKTEDTAVYYCVRQGYSYDWGPWFAYWGQGTLVTVSA

SEQ ID NO: 378 - protein, 125 aa, Synthetic construct
EVKLLESGGGLVQPKGSLKLSCAASGFTFNTYAMNWVRQAPGKGLEWVARIRSKYNNYATYYADSVKDRFTISRDDSQSILYLQMNNLKTEDTAMYYCVRHGNFGNSYVSWFAYWGQGTLVTVSA

SEQ ID NO: 379 - protein, 125 aa, Synthetic construct
EVQLVESGGGLVQPGGSLRLSCAASGFTFNTYAMNWVRQAPGKGLEWVGRIRSKYNNYATYYADSVKDRFTISRDDSKNSLYLQMNSLKTEDTAVYYCARHGNFGNSYVSWFAYWGQGTLVTVSS

SEQ ID NO: 380 - protein, 125 aa, Synthetic construct
EVQLVESGGGLVQPGGSLRLSCAASGFTFSTYAMNWVRQAPGKGLEWVARIRSKYNNYATYYADSVKDRFTISRDDSKNSLYLQMNSLKTEDTAVYYCARHGNFGNSYVSWFAYWGQGTLVTVSS

SEQ ID NO: 381 - protein, 125 aa, Synthetic construct
EVQLVESGGGLVQPGGSLRLSCAASGFTFSTYAMNWVRQAPGKGLEWVGRIRSKYNNYATYYADSVKDRFTISRDDSKNSLYLQMNSLKTEDTAVYYCVRHGNFGNSYVSWFAYWGQGTLVTVSS

SEQ ID NO: 382 - protein, 125 aa, Synthetic construct
EVQLVESGGGLVQPGGSLRLSCAASGFTFNTYAMNWVRQAPGKGLEWVARIRSKYNNYATYYADSVKDRFTISRDDSKNSLYLQMNSLKTEDTAVYYCARHGNFGNSYVSWFAYWGQGTLVTVSS

SEQ ID NO: 383 - protein, 125 aa, Synthetic construct
EVQLVESGGGLVQPGGSLRLSCAASGFTFNTYAMNWVRQAPGKGLEWVGRIRSKYNNYATYYADSVKDRFTISRDDSKNSLYLQMNSLKTEDTAVYYCVRHGNFGNSYVSWFAYWGQGTLVTVSS

SEQ ID NO: 384 - protein, 125 aa, Synthetic construct
EVQLVESGGGLVQPGGSLRLSCAASGFTFSTYAMNWVRQAPGKGLEWVARIRSKYNNYATYYADSVKDRFTISRDDSKNSLYLQMNSLKTEDTAVYYCVRHGNFGNSYVSWFAYWGQGTLVTVSS

SEQ ID NO: 385 - protein, 125 aa, Synthetic construct
EVQLVESGGGLVQPGGSLRLSCAASGFTFNTYAMNWVRQAPGKGLEWVARIRSKYNNYATYYADSVKDRFTISRDDSKNSLYLQMNSLKTEDTAVYYCVRHGNFGNSYVSWFAYWGQGTLVTVSS

SEQ ID NO: 386 - protein, 125 aa, Synthetic construct
EVQLVESGGGLVQPGGSLRLSCAASGFTFNTYAMNWVRQAPGKGLEWVGRIRNKYNNYATEYADSVKDRFTISRDDSKNSLYLQMNSLKTEDTAVYYCVRHGNFGNSYVSWFAYWGQGTLVTVSS

SEQ ID NO: 387 - protein, 125 aa, Synthetic construct
EVQLVESGGGLVQPGGSLRLSCAASGFTFNTYAMNWVRQAPGKGLEWVARIRNKYNNYATEYADSVKDRFTISRDDSKNSLYLQMNSLKTEDTAVYYCVRHGNFGNSYVSWFAYWGQGTLVTVSS

SEQ ID NO: 388 - protein, 125 aa, Synthetic construct
EVQLVESGGGLVQPGGSLRLSCAASGFTFNTYAMNWVRQAPGKGLEWVARTRSKANSYTTYYAASVKGRFTISRDDSKNSLYLQMNSLKTEDTAVYYCARHGNFGNSYVSWFAYWGQGTLVTVSS

SEQ ID NO: 389 - protein, 125 aa, Synthetic construct
EVQLVESGGGLVQPGGSLRLSCAASGFTFNTYAMNWVRQAPGKGLEWVGRTRSKANSYTTYYAASVKGRFTISRDDSKNSLYLQMNSLKTEDTAVYYCARHGNFGNSYVSWFAYWGQGTLVTVSS

SEQ ID NO: 390 - protein, 125 aa, Synthetic construct
EVQLVESGGGLVQPGGSLRLSCAASGFTFNTYAMNWVRQAPGKGLEWVGRIRSKYNNYATEYAASVKDRFTISRDDSKNSLYLQMNSLKTEDTAVYYCVRHGNFGNSYVSWFAYWGQGTLVTVSS

SEQ ID NO: 391 - protein, 125 aa, Synthetic construct
EVQLVESGGGLVQPGGSLRLSCAASGFTFNTYAMNWVRQAPGKGLEWVARIRNKYNNYATEYAASVKDRFTISRDDSKNSLYLQMNSLKTEDTAVYYCVRHGNFGNSYVSWFAYWGQGTLVTVSS

SEQ ID NO: 392 - protein, 125 aa, Synthetic construct
EVKLLESGGGLVQPKGSLKLSCAASGFTFNTYAMNWVRQAPGKGLEWVARTASKANNYATYYADSVKDRFTISRDDSQSILYLQMNNLKTEDTAMYYCVRHGNFGNSYVSWFAYWGQGTLVTVSA

SEQ ID NO: 393 - protein, 125 aa, Synthetic construct
EVKLLESGGGLVQPKGSLKLSCAASGFTFNTYAMNWVRQAPGKGLEWVARTRSKYNSYATYYADSVKDRFTISRDDSQSILYLQMNNLKTEDTAMYYCVRHGNFGNSYVSWFAYWGQGTLVTVSA

SEQ ID NO: 394 - protein, 125 aa, Synthetic construct
EVKLLESGGGLVQPKGSLKLSCAASGFTFNTYAMNWVRQAPGKGLEWVARTRSKYNNYTTYYADSVKDRFTISRDDSQSILYLQMNNLKTEDTAMYYCVRHGNFGNSYVSWFAYWGQGTLVTVSA

SEQ ID NO: 395 - protein, 125 aa, Synthetic construct
EVKLLESGGGLVQPKGSLKLSCAASGFTFNTYAMNWVRQAPGKGLEWVARTRSKANSYATYYADSVKDRFTISRDDSQSILYLQMNNLKTEDTAMYYCVRHGNFGNSYVSWFAYWGQGTLVTVSA

SEQ ID NO: 396 - protein, 125 aa, Synthetic construct
EVKLLESGGGLVQPKGSLKLSCAASGFTFNTYAMNWVRQAPGKGLEWVARTRSKYNSYTTYYADSVKDRFTISRDDSQSILYLQMNNLKTEDTAMYYCVRHGNFGNSYVSWFAYWGQGTLVTVSA

SEQ ID NO: 397 - protein, 125 aa, Synthetic construct
EVKLLESGGGLVQPKGSLKLSCAASGFTFNTYAMNWVRQAPGKGLEWVARTRSKANSYTTYYADSVKDRFTISRDDSQSILYLQMNNLKTEDTAMYYCVRHGNFGNSYVSWFAYWGQGTLVTVSA

SEQ ID NO: 398 - protein, 125 aa, Synthetic construct
EVKLLESGGGLVQPKGSLKLSCAASGFTFNTYAMNWVRQAPGKGLEWVARTRSKYNNYATYYAASVKDRFTISRDDSQSILYLQMNNLKTEDTAMYYCVRHGNFGNSYVSWFAYWGQGTLVTVSA

SEQ ID NO: 399 - protein, 125 aa, Synthetic construct
EVKLLESGGGLVQPKGSLKLSCAASGFTFNTYAMNWVRQAPGKGLEWVARTRSKYNNYATYYADSVKGRFTISRDDSQSILYLQMNNLKTEDTAMYYCVRHGNFGNSYVSWFAYWGQGTLVTVSA

SEQ ID NO: 400 - protein, 125 aa, Synthetic construct
EVKLLESGGGLVQPKGSLKLSCAASGFTFNTYAMNWVRQAPGKGLEWVARTRSKANSYATYYAASVKDRFTISRDDSQSILYLQMNNLKTEDTAMYYCVRHGNFGNSYVSWFAYWGQGTLVTVSA

SEQ ID NO: 401 - protein, 125 aa, Synthetic construct
EVKLLESGGGLVQPKGSLKLSCAASGFTFNTYAMNWVRQAPGKGLEWVARTRSKANSYATYYADSVKGRFTISRDDSQSILYLQMNNLKTEDTAMYYCVRHGNFGNSYVSWFAYWGQGTLVTVSA

SEQ ID NO: 402 - protein, 125 aa, Synthetic construct
EVKLLESGGGLVQPKGSLKLSCAASGFTFNTYAMNWVRQAPGKGLEWVARTRSKANSYATYYAASVKGRFTISRDDSQSILYLQMNNLKTEDTAMYYCVRHGNFGNSYVSWFAYWGQGTLVTVSA

SEQ ID NO: 403 - protein, 129 aa, Synthetic construct
EVQLEVQLLESGGGLVQPGGSLRLSCAASGFTFSTYAMNWVRQAPGKGLEWVSRIRSKYNNYATYYADSVKGRFTISRDDSKNTLYLQMNSLRAEDTAVYYCVRHGNFGNSYVSWFAYWGQGTLVTVSS

SEQ ID NO: 404 - protein, 115 aa, Synthetic construct
EVQLVESGGGLVQPGGSLKLSCAASGFTFSGSAMHWVRQASGKGLEWVGRIRSKANSYATAYAASVKGRFTISRDDSKNTAYLQMNSLKTEDTAVYYCTRYFDYWGQGTLVTVSS

SEQ ID NO: 405 - protein, 125 aa, Synthetic construct
EVQLVESGGGLVQPGGSLRLSCAASGFTFNTYAMNWVRQAPGKGLEWVARIRSKYNNYATYYADSVKDRFTISRDDSKNTLYLQMNSLRAEDTAVYYCVRHGNFGNSYVSWFAYWGQGTLVTVSS

SEQ ID NO: 406 - protein, 125 aa, Synthetic construct
EVQLVESGGGLVQPGGSLRLSCAASGFTFNTYAMNWVRQAPGKGLEWVGRIRSKYNNYATYYADSVKDRFTISRDNSKNTLYLQMNSLRAEDTAVYYCVRHGNFGNSYVSWFAYWGQGTLVTVSS

SEQ ID NO: 407 - protein, 121 aa, Synthetic construct
EVQLVESGGGLVQPGGSLKLSCAASGFTFSTYAMHWVRQASGKGLEWVGRIRTKSSNYATYYAASVKGRFTISRDDSKNTAYLQMNSLKTEDTAVYYCTRDMGIRRQFAYWGQGTLVTVSS

SEQ ID NO: 408 - protein, 121 aa, Synthetic construct
EVQLVESGGGLVQPGGSLKLSCAASGFTFSTYAMHWVRQASGKGLEWVGRIRTKSSNYYTYYAASVKGRFTISRDDSKNTAYLQMNSLKTEDTAVYYCTRDMGIRRQFAYWGQGTLVTVSS

SEQ ID NO: 409 - protein, 121 aa, Synthetic construct
EVQLVESGGGLVQPGGSLKLSCAASGFTFSTYAMHWVRQASGKGLEWVGRIRTKSSSYATYYAASVKGRFTISRDDSKNTAYLQMNSLKTEDTAVYYCTRDMGIRRQFAYWGQGTLVTVSS

SEQ ID NO: 410 - protein, 121 aa, Synthetic construct
EVQLVESGGGLVQPGGSLKLSCAASGFTFSTYAMHWVRQASGKGLEWVGRIRTKSSSYYTYYAASVKGRFTISRDDSKNTAYLQMNSLKTEDTAVYYCTRDMGIRRQFAYWGQGTLVTVSS

SEQ ID NO: 411 - protein, 117 aa, Synthetic construct
EVQLVESGGGLVQPKGSLKLSCAASGFTFNTYAMNWVRQAPGKGLEWVARIRSKSNNYATYYADSVKDRFTISRDDSQSMLYLQMNNLKTEDTAMYYCVAYGSRNYWGQGTTLTVSS

SEQ ID NO: 412 - protein, 120 aa, Synthetic construct
EVQLVESGGGLVQPGGSLRLSCAASGFTFSYYWMDWVRQAPGKGLEWVGRIRLKSNNYATEYAASVKGRFTISRDDSKNSLYLQMNSLKTEDTAVYYCNRRDEYYAMDYWGQGTMVTVSS

SEQ ID NO: 413 - protein, 122 aa, Synthetic construct
EVQLVESGGGLVQPGGSLRLSCAASGFTFSNYWMNWVRQAPGKGLEWVAEIRLKSNNFGRYYAASVKGRFTISRDDSKNTLYLQMNSLKTEDTAVYYCTTYGNYVGHYFDHWGQGTTVTVSS

SEQ ID NO: 414 - protein, 126 aa, Synthetic construct
EVQLEVQLVESGGGLVKPGGSLRLSCAASGFTFSNYWMNWVRQAPGKGLEWVAEIRLKSNNFGRYYAASVKGRFTISRDDSKNTLYLQMNSLKTEDTAVYYCTTYGNYVGHYFDHWGQGTTVTVSS

SEQ ID NO: 415 - protein, 126 aa, Synthetic construct
EVQLEVQLVESGGGLVQPGGSLRLSCAASGFTFSNYWMNWVRQAPGKGLEWVAEIRLKSNNFGRYYAASVKGRFTISRDDSKNTLYLQMNSLKTEDTAVYYCTTYGNYVGHYFDHWGQGTTVTVSS

SEQ ID NO: 416 - protein, 114 aa, Synthetic construct
EVQLVESGGGLVQPGGSLKLSCAASGFTFSNYWMNWVRQASGKGLEWVGEIRSKSNNYATHYAESVKGRFTISRDDSKNTAYLQMNSLKTEDTAVYYCSNRYYWGQGTLVTVSS

SEQ ID NO: 417 - protein, 114 aa, Synthetic construct
EVQLVESGGGLVQPGGSLKLSCAASGFTFSNYWMNWVRQASGKGLEWVGEIRSKSNNYATHYAESVKGRFTISRDDSKNTAYLQMNSLKTEDTAVYYCTNRYYWGQGTLVTVSS

SEQ ID NO: 418 - protein, 121 aa, Synthetic construct
EVQLEESGGGLVQPKGSLKLSCGASDFTFNTYAMHWVRQAPGMALEWVARIRTKSSNYATYYADSVKDRFTISRDDSQNMLYLQMNNLKTEDTAMYYCVRDMGQRRQFAYWGQGTLVTVSA

SEQ ID NO: 419 - protein, 121 aa, Synthetic construct
EVQLVESGGGLVQPGGSLKLSCAASGFTFSTYAMHWVRQASGKGLEWVGRIRTKSSNYATYYAASVKGRFTISRDDSKNTAYLQMNSLKTEDTAVYYCTRDMGQRRQFAYWGQGTLVTVSS

SEQ ID NO: 420 - protein, 121 aa, Synthetic construct
EVQLVESGGGLVQPKGSLKLSCAASGFTFNTYAMHWVRQAPGKGLEWVARIRTKSNNYATYYVDSVKDRITISRDDSQSMLYLQMNNLKTEDTAMYYCVRDMGIRRQFAYWGQGTLVTVSA

SEQ ID NO: 421 - protein, 121 aa, Synthetic construct
EVQLVESGGGLVQPKGSLKLSCGASDFTFNTYAMHWVRQAPGMALEWVARIRTKSSNYATYYADSVKDRFTISRDDSQNMLYLQMNNLKTEDTAMYYCVRDMGQRRQFAYWGQGTLVTVSA

SEQ ID NO: 422 - protein, 127 aa, Synthetic construct
EVQLVESGGGLVQPGGSLRLSCAASGFAFSDYYMDWVRQAPGKGLQWVGRIRRKANNYSTTYAASVKGRFTISRDDSKDSLYLQMNSLKTEDTAIYYCVRVNYFDGSGYSLDAFDVWGQGTVVTVSS

SEQ ID NO: 423 - protein, 119 aa, Synthetic construct
EVQLVESGGGLVQPKGSLKLSCAASGFTFNIYAMNWVRQAPGKGLEWVARIRSKSNNYATYYADSMKDRFTISRDDSQSMLYLQMNNLKTEDTAMYYCVRHGNYYFDYWGQGTTLTVSS

SEQ ID NO: 424 - protein, 119 aa, Synthetic construct
EVQLVESGGGLVQPKGSLKLSCAASGFTFNTYAMHWVRQAPGKGLEWVARIRSKSSNYATYYADSVKDRFTISRDDSQSMLYLQMNNLKTEDTAMYYCVRPLKWYFDVWGTGTTVTVSS

SEQ ID NO: 425 - protein, 125 aa, Synthetic construct; identical to SEQ ID NO: 166

SEQ ID NO: 426 - protein, 125 aa, Synthetic construct; identical to SEQ ID NO: 168

SEQ ID NO: 427 - protein, 117 aa, Synthetic construct
EVQLVESGGGLVQPGGSLRLSCAASGFTFSDAWMDWVRQAPGKGLEWVGRIRSKANNHATAYAASVKGRFTISRDDSKNSLYLQMNSLKTEDTAVYYCTGGYYPVYWGQGTLVTVSS

SEQ ID NO: 428 - protein, 117 aa, Synthetic construct
EVQLVESGGGLVQPGGSLRLSCAASGFTFSDAWMDWVRQAPGKGLEWVGEIRSKANNHATYYAASVKGRFTISRDDSKNSLYLQMNSLKTEDTAVYYCTGGYYPVYWGQGTLVTVSS

SEQ ID NO: 429 - protein, 117 aa, Synthetic construct
EVQLVESGGGLVQPGGSLRLSCAASGFTFSDAWMDWVRQAPGKGLEWVAEIRSKANNHATYYAASVKGRFTISRDDSKNSVYLQMNSLKTEDTAVYYCTGGYYPVYWGQGTLVTVSS

SEQ ID NO: 430 - protein, 122 aa, Synthetic construct
EVQLVETGGGLVQPKGSMKLSCAASGFTFNANAMNWIRQAPGKGLEWVARIRTKSNNYATYYAGSVKDRFTISRDDAQNMLYLQMNDLKTEDTAMYYCVRDYYGSSAWITYWGQGTLVTVSA

SEQ ID NO: 431 - protein, 122 aa, Synthetic construct
EVQLVESGGGLVQPGGSLKLSCAASGFTFSGSAMHWVRQASGKGLEWVGRIRSKANNYATAYAASVKGRFTISRDDSKNTAYLQMNSLKTEDTAAYYCIRDYYGATRGFQHWGQGTLVTVSS

SEQ ID NO: 432 - protein, 122 aa, Synthetic construct
EVQLVESGGGLVQPGGSLKLSCAASGFTFNANAMNWVRQASGKGLEWVGRIRTKSNNYATYYAGSVKDRFTISRDDSKNTAYLQMNSLKTEDTAAYYCVRDYYGSSAWITYWGQGTLVTVSS

SEQ ID NO: 433 - protein, 122 aa, Synthetic construct
EVQLVESGGGLVQPGGSLRLSCAASGFTFNANAMNWVRQAPGKGLEWVGRIRTKSNNYATYYAGSVKDRFTISRDDSKNSLYLQMNSLKTEDTAVYYCVRDYYGSSAWITYWGQGTLVTVSS

SEQ ID NO: 434 - protein, 122 aa, Synthetic construct
EVQLVESGGGLVQPGRSLRLSCTASGFTFNANAMNWVRQAPGKGLEWVGRIRTKSNNYATYYAGSVKDRFTISRDDSKNIAYLQMNSLKTEDTAVYYCVRDYYGSSAWITYWGQGTLVTVSS

SEQ ID NO: 435 - protein, 141 aa, Synthetic construct
MGWTLVFLFLLSVTAGVHSLVQLVESGGGLVKPGGSLRLSCAASGFTFNANAMNWIRQAPGKGLEWVSRIRTKSNNYATYYAGSVKDRFTISRDNAKNSLYLQMNSLRAEDTAVHYCVRDYYGSSAWITYWGQGTLVTVSS

SEQ ID NO: 436 - protein, 121 aa, Synthetic construct
EVQLVESGGGLVQPGGSLKLSCAASGFTFSGSAMHWVRQASGKGLEWVGRIRSKANSYATAYAASVKGRFTISRDDSKNTAYLQMNSLKTEDTAVYYCTSGIYDSSGYDYWGQGTLVTVSS

SEQ ID NO: 437 - protein, 129 aa, Synthetic construct
EVQLEVQLVESGGGLVQPGGSLRLSCAASGFTFSTYAMNWVRQAPGKGLEWVGRIRSKYNNYATYYADSVKGRFTISRDDSKNTLYLQMNSLRAEDTAVYYCVRHGNFGDSYVSWFAYWGQGTLVTVSS

SEQ ID NO: 438 - protein, 129 aa, Synthetic construct
EVQLEVQLVESGGGLVQPGGSLRLSCAASGFTFSTYAMSWVRQAPGKGLEWVGRIRSKYNNYATYYADSVKGRFTISRDDSKNTLYLQMNSLRAEDTAVYYCVRHGNFGDSYVSWFAYWGQGTLVTVSS

SEQ ID NO: 439 - protein, 129 aa, Synthetic construct
EVQLEVQLVESGGGLVQPGGSLRLSCAASGFTFSTYAMNWVRQAPGKGLEWVGRIRSKYNNYATYYADSVKGRFTISRDDSKNTLYLQMNSLRAEDTAVYYCVRHGNFGDSYVSWFDYWGQGTLVTVSS

SEQ ID NO: 440 - protein, 125 aa, Synthetic construct
EVQLVESGGGLVQPGGSLRLSCAASGFTFSTYAMNWVRQAPGKGLEWVGRIRSKYNNYATYYADSVKGRFTISRDDSKNTLYLQMNSLRAEDTAVYYCVRHGNFGPSYVSWFAYWGQGTLVTVSS

SEQ ID NO: 441 - protein, 125 aa, Synthetic construct
EVQLVESGGGLVQPGGSLRLSCAASGFTFSTYAMNWVRQAPGKGLEWVGRIRSKYNNYATAYADSVKGRFTISRDDSKNTLYLQMNSLRAEDTAVYYCVRHGNFGDSYVSWFAYWGQGTLVTVSS

SEQ ID NO: 442 - protein, 125 aa, Synthetic construct
EVQLVESGGGLVQPGGSLRLSCAASGFTFSTYAMNWVRQAPGKGLEWVGRIRSKYNNYATYYADSVKGRFTISRDDSKNTLYLQMNSLRAEDTAVYYCVRHGNFGESYVSWFAYWGQGTLVTVSS

SEQ ID NO: 443 - protein, 125 aa, Synthetic construct
EVQLVESGGGLVQPGGSLRLSCAASGFTFSTYAMNWVRQAPGKGLEWVGRIRSKYNNYATYYADSVKGRFTISRDDSKNTLYLQMNSLRAEDTAVYYCVRHGNFGQSYVSWFAYWGQGTLVTVSS

SEQ ID NO: 444 - protein, 125 aa, Synthetic construct
EVQLVESGGGLVQPGGSLRLSCAASGFTFSTYAMNWVRQAPGKGLEWVGRIRSKYNNYATYYADSVKGRFTISRDDSKNTLYLQMNSLRAEDTAVYYCVRHGNFGDNYVSWFAYWGQGTLVTVSS

SEQ ID NO: 445 - protein, 125 aa, Synthetic construct
EVQLVESGGGLVQPGGSLRLSCAASGFTFSTYAMNWVRQAPGKGLEWVGRIRSKYNNYATYYADSVKGRFTISRDDSKNTLYLQMNSLRAEDTAVYYCVRHGNFGDQYVSWFAYWGQGTLVTVSS

SEQ ID NO: 446 - protein, 125 aa, Synthetic construct
EVQLVESGGGLVQPGGSLRLSCAASGFTFSTYAMNWVRQAPGKGLEWVGRIRSKANNYATYYADSVKGRFTISRDDSKNTLYLQMNSLRAEDTAVYYCVRHGNFGDSYVSWFDYWGQGTLVTVSS

SEQ ID NO: 447 - protein, 125 aa, Synthetic construct
EVQLVESGGGLVQPGGSLRLSCAASGFTFSTYAMNWVRQAPGKGLEWVGRIRSKYNNYATAYADSVKGRFTISRDDSKNTLYLQMNSLRAEDTAVYYCVRHGNFGDSYVSWFDYWGQGTLVTVSS

SEQ ID NO: 448 - protein, 125 aa, Synthetic construct
EVQLVESGGGLVQPGGSLRLSCAASGFTFSTYAMNWVRQAPGKGLEWVGRIRSKYNNYATYYADSVKGRFTISRDDSKNTLYLQMNSLRAEDTAVYYCVRHGNFGASYVSWFDYWGQGTLVTVSS

SEQ ID NO: 449 - protein, 125 aa, Synthetic construct
EVQLVESGGGLVQPGGSLRLSCAASGFTFSTYAMNWVRQAPGKGLEWVGRIRSKYNNYATYYADSVKGRFTISRDDSKNTLYLQMNSLRAEDTAVYYCVRHGNFGQSYVSWFDYWGQGTLVTVSS

SEQ ID NO: 450 - protein, 125 aa, Synthetic construct
EVQLVESGGGLVQPGGSLRLSCAASGFTFSTYAMNWVRQAPGKGLEWVGRIRSKYNNYATYYADSVKGRFTISRDDSKNTLYLQMNSLRAEDTAVYYCVRHGNFGDEYVSWFDYWGQGTLVTVSS

SEQ ID NO: 451 - protein, 125 aa, Synthetic construct
EVQLVESGGGLVQPGGSLRLSCAASGFTFSTYAMNWVRQAPGKGLEWVGRIRSKYNNYATYYADSVKGRFTISRDDSKNTLYLQMNSLRAEDTAVYYCVRHGNFGDNYVSWFDYWGQGTLVTVSS

SEQ ID NO: 452 - protein, 125 aa, Synthetic construct
EVQLVESGGGLVQPGGSLRLSCAASGFTFSTYAMNWVRQAPGKGLEWVGRIRSKYNNYATYYADSVKGRFTISRDDSKNTLYLQMNSLRAEDTAVYYCVRHGNFGDPYVSWFDYWGQGTLVTVSS

SEQ ID NO: 453 - protein, 125 aa, Synthetic construct
EVQLVESGGGLVQPGGSLRLSCAASGFTFSTYAMNWVRQAPGKGLEWVGRIRSKYNNYATYYADSVKGRFTISRDDSKNTLYLQMNSLRAEDTAVYYCVRHGNFGDQYVSWFDYWGQGTLVTVSS

SEQ ID NO: 454 - protein, 125 aa, Synthetic construct
EVQLVESGGGLVQPGGSLRLSCAASGFTFSTYAMNWVRQAPGKGLEWVGRIRSKANNYATAYADSVKGRFTISRDDSKNTLYLQMNSLRAEDTAVYYCVRHGNFGDSYVSWFAYWGQGTLVTVSS

SEQ ID NO: 455 - protein, 125 aa, Synthetic construct
EVQLVESGGGLVQPGGSLRLSCAASGFTFSTYAMNWVRQAPGKGLEWVGRIRSKANNYATAYADSVKGRFTISRDDSKNTLYLQMNSLRAEDTAVYYCVRHGNFGASYVSWFAYWGQGTLVTVSS

SEQ ID NO: 456 - protein, 125 aa, Synthetic construct
EVQLVESGGGLVQPGGSLRLSCAASGFTFSTYAMNWVRQAPGKGLEWVGRIRSKANNYATAYADSVKGRFTISRDDSKNTLYLQMNSLRAEDTAVYYCVRHGNFGQSYVSWFAYWGQGTLVTVSS

SEQ ID NO: 457 - protein, 125 aa, Synthetic construct
EVQLVESGGGLVQPGGSLRLSCAASGFTFSTYAMNWVRQAPGKGLEWVGRIRSKANNYATAYADSVKGRFTISRDDSKNTLYLQMNSLRAEDTAVYYCVRHGNFGDSYVSWFDYWGQGTLVTVSS

SEQ ID NO: 458 - protein, 142 aa, Synthetic construct
MYLGLNCVFIVFLLKGVQSEVNLEESGGGLVQPGRSMKLSCVASGFTFSNYWMTWVRQSPEKGLEWVAEIRLKSNNYATHYAESVKGRFTISRDDSKSSVYLQMNNLRAEDTAIYYCTRGGGYDVGAWFAYWGQGTLVTVSA

SEQ ID NO: 459 - protein, 120 aa, Synthetic construct
EVQLVESGGGLVQPKGSLKLSCAASGFNFNTYAMHWVCQAPGKGLEWIGRIRSKSHNYATDYADPVKDRFTISRDDSQGLLYLLMNNLKTEDTAMYYCMREGIYGSFAYWGQGTLVTVSA

SEQ ID NO: 460 - protein, 129 aa, Synthetic construct
EVQLEVQLVESGGGLVQPGGSLRLSCAASGFTFNTYAMNWVRQAPGKGLEWVGRIRSKYNNYATYYADSVKGRFTISRDDSKNTLYLQMNSLRAEDTAVYYCVRHGNFGNSYVSWFAYWGQGTLVTVSS

SEQ ID NO: 461 - protein, 121 aa, Synthetic construct
EVQLLESGGGLVQPGGSLRLSCAASGFTFSTYAMNWVRQAPGKGLEWVALISSGGSYKYYADSVKGRFTISRDNSKNTLYLQMNSLRAEDTAVYYCAKDNFILLNSWFDYWGQGTLVTVSS

SEQ ID NO: 462 - protein, 119 aa, Synthetic construct
EVQLVETGGGLVQPKGSLKLSCAASGFTFNTNAMNWVRQAPGKGLEWVARIRTKRYNYTTFYADSVKDRFTISRDDSQSMLFLQMNNLKTEDTAMYYCVTGGTGTFDYWGQGTTLTVSS

SEQ ID NO: 463 - protein, 125 aa, Synthetic construct
EVKLVESGGGLVQPGGSLRLSCAASGFTFNTYAMNWVRQAPGKGLEWVARIRSKYNNYATYYADSVKDRFTISRDDSKSSLYLQMNNLKTEDTAMYYCVRHGNFGNSYVSWFAYWGQGTLVTVSS

SEQ ID NO: 464 - protein, 125 aa, Synthetic construct
EVKLVESGGGLVKPGRSLRLSCAASGFTFNTYAMNWVRQAPGKGLEWVARIRSKYNNYATYYADSVKDRFTISRDDSKSILYLQMNNLKTEDTAMYYCVRHGNFGNSYVSWFAYWGQGTLVTVSS

SEQ ID NO: 465 - protein, 125 aa, Synthetic construct
EVKLVESGGGLVKPGRSLRLSCAASGFTFNTYAMNWVRQAPGKGLEWVARIRSKYNNYATYYADSVKDRFTISRDDSKSILYLQMNSLKTEDTAMYYCVRHGNFGNSYVSWFAYWGQGTLVTVSS

SEQ ID NO: 466 - protein, 125 aa, Synthetic construct
EVKLVESGGGLVKPGRSLRLSCAASGFTFNTYAMNWVRQAPGKGLEWVARIRSKYNNYATYYADSVKDRFTISRDDSKSILYLQMNSLKTEDTAMYYCVRHGNFGNSYVSWFAYWGQGTMVTVSS

SEQ ID NO: 467 - protein, 122 aa, Synthetic construct
EVQLEVQLQQSGAEVKKPGASVKVSCKASGFNIKDTYIHWVRQAPGKGLEWMGRIDPANDNTLYASKFQGRVTITADTSTNTAYMELSSLRSEDTAVYYCGRGYGYYVFDHWGQGTTVTVSS

SEQ ID NO: 468 - protein, 122 aa, Synthetic construct
EVQLVESGGGLVQPGGSLRLSCAASGFTFTESFMDWVRQAPGKGLEWVGRIRNKANGYTTEYAASVKGRFTISRDDSKNSLYLQMNSLKTEDTAVYYCVRGGEYPLYVMDYWGQGTLVTVSS

SEQ ID NO: 469 - protein, 123 aa, Synthetic construct
EVMLVESGEGLVQPKGSLKLSCAASGFTFNTYAMNWVRQAPGKGLEWVARIRSKSNNYATYYADSVKDRFTISRDDSQSMLYLQMNNLKTEDTAMYYCVRRGGKETDYAMDYWGQGTSVTVSS

SEQ ID NO: 470 - protein, 123 aa, Synthetic construct
EVKLHESGGGFVQPKGSLKLSCAASGFTFNAYAMNWVRQAPGKGLEWVARIRSKSNNYETYYADSVKDFTISRDDSQYMVYLQMNNLKSEDTAMYYCVRRGSMRSYYYAMDYWGQGTSVTVSS

SEQ ID NO: 471 - protein, 125 aa, Synthetic construct
  VARIANT 99: note = X can be any amino acid
  VARIANT 100: note = X can be any amino acid
EVQLVETGGGLVQPKGSLKLSCAASGFTFNTNAMNWVRQAPGKGLEWVARIRSKSNNYATYYADSVKDRFTISRDDSQSMLYLQMNNLKTEDTAMYYCXXVTEHYDYDYYVMDYWGQGTSVTVSS

SEQ ID NO: 472 - protein, 100 aa, Synthetic construct
EVQLVESGGGLVQPKGSLKLSCAASGFSFNTYAMNWVRQAPGKGLEWVARIRSKSNNYATYYADSVKDRFTISRDDSESMLYLQMNNLKTEDTAMYYCVR

SEQ ID NO: 473 - protein, 123 aa, Synthetic construct
EVQLVESGGGLVQPKGSLKLSCAASGFTFNTNAMNWVRQAPGKGLEWVARIRSKSNNYATYYADSVKDRFTISRDDSESMLYLQMNNLKTEDTAMYYCVTEHYDYDYYVMDYWGQGTSVTVSS

SEQ ID NO: 474 - protein, 125 aa, Synthetic construct
EVQLVESGGGLVQPKGSLKLSCAASGFTFNTNAMNWVRQAPGKGLEWVARIRSKSNNYATYYADSVKDRFTISRDDSESMLYLQMNNLKTEDTAMYYCARVTEHYDYDYYVMDYWGQGTSVTVSS

SEQ ID NO: 475 - protein, 123 aa, Synthetic construct
EVQLVESGGGLVQPGGSLRLSCAASGFTFNTNAMNWVRQAPGKGLEWVGRIRSKSNNYATYYADSVKDRFTISRDDSKNSLYLQMNSLKTEDTAVYYCAREHYDYDYYVMDYWGQGTSVTVSS

SEQ ID NO: 476 - protein, 125 aa, Synthetic construct
EVQLVESGGGLVQPGGSLRLSCAASGFTFNTNAMNWVRQAPGKGLEWVGRIRSKSNNYATYYADSVKDRFTISRDDSKNSLYLQMNSLKTEDTAVYYCARVTEHYDYDYYVMDYWGQGTSVTVSS

SEQ ID NO: 477 - protein, 123 aa, Synthetic construct
EVQLLESGGGLVQPGGSLRLSCAASGFTFNTNAMNWVRQAPGKGLEWVSRIRSKSNNYATYYADSVKDRFTISRDNSKNTLYLQMNSLRAEDTAVYYCAKEHYDYDYYVMDYWGQGTSVTVSS

SEQ ID NO: 478 - protein, 125 aa, Synthetic construct
EVQLLESGGGLVQPGGSLRLSCAASGFTFNTNAMNWVRQAPGKGLEWVSRIRSKSNNYATYYADSVKDRFTISRDNSKNTLYLQMNSLRAEDTAVYYCAKVTEHYDYDYYVMDYWGQGTSVTVSS

SEQ ID NO: 479 - protein, 123 aa, Synthetic construct
EVQLVESGGGLVQPGGSLRLSCAASGFTFNTNAMNWVRQAPGKGLEWVGRIRSKSNNYATYYADSVKDRFTISRDDSKNSLYLQMNSLKTEDTAVYYCVTEHYDYDYYVMDYWGQGTSVTVSS

SEQ ID NO: 480 - protein, 123 aa, Synthetic construct
EVQLLESGGGLVQPGGSLRLSCAASGFTFNTNAMNWVRQAPGKGLEWVSRIRSKSNNYATYYADSVKDRFTISRDNSKNTLYLQMNSLRAEDTAVYYCVTEHYDYDYYVMDYWGQGTSVTVSS

SEQ ID NO: 481 - protein, 123 aa, Synthetic construct
EVQLVESGGGLVQPGGSLRLSCAASGFTFNTYAMNWVRQAPGKGLEWVGRIRSKYNNYATYYADSVKGRFTISRDTSKNTLYLQMNSLRAEDTAVYYCVRHGNFGNSYVSWFAYWGQGTLVTV

SEQ ID NO: 482 - protein, 118 aa, Synthetic construct
EVQLVESGGRLVQPKGSLKLSCAASGFTFNTYAMYWIRQAPGKGLEWVARIRSKSNNYAIYYADSVKDRFTISRDDSQSMLYLQMNNLKTEDTAMYYCVRGWDWFAYWGQGTPVTVSA

SEQ ID NO: 483 - protein, 119 aa, Synthetic construct
EVQLVESGGGLVQPKGSLKLSCAASGFTFNNYAMNWGRQAPGKGLEWVARIRSKRNNYATHYDDSVKDRFTISRDDSQNMLYLQLNNLKTEDTAMYYCVRDGPYAMDYWGQGTSVTVSS

SEQ ID NO: 484 - protein, 114 aa, Synthetic construct
EVQLVESGGGLVQPKGSLRLSCAASGFIFNTYAMNWVRQAPGKGLEWVARIRSKSNKYATYYVDSVKDRFTISRDDSQSMLYLQMNNLKTEDTAMYYCVRDGIWGQGTLVTVSA

SEQ ID NO: 485 - protein, 125 aa, Synthetic construct
EVQLVESGGGLVQPGGSLRLSCAASGFTFSTYAMNWVRQAPGKGLEWVGRIRSKYNNYATYYADSVKGRFTISRDDSKNSLYLQMNSLKTEDTAVYYCVRHGNFGNSYVSWFAYWGQGTLVTVSS

SEQ ID NO: 486 - protein, 119 aa, Synthetic construct
EVQLVESGGRLVQPKGSLKLSCAASGFTFNTYAMYWIRQAPGKGLEWVARIRSKSNNYAIYYADSVKDRFTIFRDDSQSMLYLQMNNLKTEDTAMYYCVRPYSDSFAYWGQGTLVTVSA

SEQ ID NO: 487 - protein, 119 aa, Synthetic construct
EVQLVESGGGLVQPGGSLRLSCAASGFTFNTYAMYWIRQAPGKGLEWVARIRSKSNNYAIYYADSVKDRFTISRDDSKNSLYLQMNSLKTEDTAVYYCARPYSDSFAYWGQGTLVTVSS

SEQ ID NO: 488 - protein, 129 aa, Synthetic construct
EVQLEVQLVESGGGLVQPGGSLKLSCAASGFTFNKYAINWVRQAPGKGLEWVARIRSKYNNYATYYADQVKDRFTISRDDSKNTAYLQMNNLKTEDTAVYYCVRHANFGNSYISYWAYWGQGTLVTVSS

SEQ ID NO: 489 - protein, 122 aa, Synthetic construct
EVQLVESGGGLVKPGGSLRLSCVASGFTFSNYWMNWVRQAPGKGLEWVAEIRLYSNNYATHYAESVKGRFTISRDDSKSTLYLQMNNLKTEDTGVYYCTRYYGNYGGYFDVWGRGTLVTVSS

SEQ ID NO: 490 - protein, 122 aa, Synthetic construct
EVQLVESGGGLVKPGGSLRLTCVASGFTFSNYWMNWVRQAPGKGLEWVAEIRLYSNNYATHYAESVKGRFTISRDDSKSTLYLQMNNLKTEDTGVYYCTRYYGNYGGYFDVWGRGTLVTVSS

SEQ ID NO: 491 - protein, 122 aa, Synthetic construct
EVQLVESGGGLVKPGGSLRLSCVASGFTFSNYWMNWVRQAPGKCLEWVAEIRLYSNNYATHYAESVKGRFTISRDDSKSTLYLQMNNLKTEDTGVYYCTRYYGNYGGYFDVWGRGTLVTVSS

SEQ ID NO: 492 - protein, 122 aa, Synthetic construct
EVQLVESGGGLVKPGGSLRLSCVASGFTFSNYWMNWVRQAPGKGLEWVAEIRLYSNNYATHYAESVKGRFTISRDDSKSTLYLQMNNLKTEDTGVYYCTRYYGNYGGYFDVWGQGTLVTVSS

SEQ ID NO: 493 - protein, 121 aa, Synthetic construct
EVQLVESGGGLVQPGGSLRLSCAASGFTFSSFALNWVRQAPGKGLEWVGHIRSKTNNYATFYAASVKDRFTVSRDDSQNTAYLQMNSLKTEDTATYYCVRRGPRDSWFGYWGQGTLVTVSS

SEQ ID NO: 494 - protein, 121 aa, Synthetic construct
EVQLVESGGGLVQPGGSLRLSCAASGFAFNSFALNWVRQAPGKGLEWVGHIRSKTNNYATFYADSVKDRFTVSRDDSKNTAYLQMNSLKTEDTATYYCVRRGPRDSWFGYWGQGTLVTVSS

SEQ ID NO: 495 - protein, 121 aa, Synthetic construct
EVQLVESGGGLVQPGGSLRLSCAASGFAFNSFALNWVRQAPGKGLEWVGHIRSKTNNYATFYAASVKDRFTVSRDDSQNTAYLQMNSLKTEDTATYYCVRRGPRDSWFGYWGQGTLVTVSS

SEQ ID NO: 496 - protein, 121 aa, Synthetic construct
EVQLVESGGGLVQPGGSLRLSCAASGFTFNSFALNWVRQAPGKGLEWVVHIRSKTNNYATFYADSVKDRFTVSRDDSKNTAYLQMNSLKTEDTATYYCVRRGPRDSWFGYWGQGTLVTVSS

SEQ ID NO: 497 - protein, 121 aa, Synthetic construct
EVQLVESGGGLVQPGGSLRLSCAASGFAFNSFALNWVRQAPGKGLEWVVHIRSKTNNYATFYADSVKDRFTVSRDDSKNTAYLQMNSLKTEDTATYYCVRRGPRDSWFGYWGQGTLVTVSS

SEQ ID NO: 498 - protein, 121 aa, Synthetic construct
EVQLVESGGGLVQPGGSLRLSCAASGFTFNSFALNWVRQAPGKGLEWVVHIRSKTNNYATFYAASVKDRFTVSRDDSQNTAYLQMNSLKTEDTATYYCVRRGPRDSWFGYWGQGTLVTVSS

SEQ ID NO: 499 - protein, 121 aa, Synthetic construct
EVQLVESGGGLVQPGGSLRLSCAASGFAFNSFALNWVRQAPGKGLEWVVHIRSKTNNYATFYAASVKDRFTVSRDDSQNTAYLQMNSLKTEDTATYYCVRRGPRDSWFGYWGQGTLVTVSS

SEQ ID NO: 500 - protein, 121 aa, Synthetic construct
EVQLVESGGGLVQPKGSLKLSCAASGFAFNSFALNWVRQAPGKSLEWVVHIRSKTNNYATFYADSVKDRFTVSRDDSQSMVYLQMNNLKTEDTGIYYCVRRGPRDSWFGYWGQGTLVTVSA

SEQ ID NO: 501 - protein, 121 aa, Synthetic construct
EVQLVESGGGLVQPGGSLRLSCAASGFAFNSFALNWVRQAPGKGLEWVGHIRSKTNNYATFYAASVKGRFTVSRDDSKNSVYLQMNSLKTEDTAVYYCVRRGPRDSWFGYWGQGTLVTVSS

SEQ ID NO: 502 - protein, 121 aa, Synthetic construct
EVQLVESGGGLVQPGGSLRLSCAASGFTFSSFALNWVRQAPGKGLEWVGHIRSKTNNYATFYAASVKGRFTVSRDDSKNTAYLQMNSLKTEDTATYYCVRRGPRDSWFGYWGQGTLVTVSS

SEQ ID NO: 503 - protein, 122 aa, Synthetic construct
EVQLVESGGGLVQPKGSLKLSCAASGFTFNTYAMNWVRQAPGKGLEWVARIRSKSNNYATYYADSVKDRFTISRDDSQSMLYLQMNNLKTEDTAMYYCVRQDYYGSSYFDYWGQGTTLTVSS

SEQ ID NO: 504 - protein, 122 aa, Synthetic construct
QVQLQQSGGGLVQPKGSLKLSCAASGFTFNTYAMNWVRQAPGKGLEWVARIRSKSNNYATYYADSVKDRFTISRDDSQSMLYLQMNNLKTEDTAMYYCVRQDYYGSSYFDYWGQGTTLTVSS

SEQ ID NO: 505 - protein, 115 aa, Synthetic construct
EVQLVETGGGLVQPKGSLKLSCAASGFTFNTNAMNWVRQAPGKGLEWVARIRSKSNNYATYYAESVKDRFTISRDDSQSMLYLQMNNLKAEDTAMYYCVTDGYYWGQGTTLTVSS

SEQ ID NO: 506 - protein, 115 aa, Synthetic construct
EVQLVESGGGLVKPGGSLRLSCAASGFTFNTNAMNWVRQAPGKGLEWVARIRSKSNNYATYYAESVKDRFTISRDDSKNTLYLQMNSLKTEDTAVYYCVTDGYYWGQGTTLTVSS

SEQ ID NO: 507 - protein, 116 aa, Synthetic construct
EVQLVESGGGLVQPKGSLKISCAASGFTFNIYAMNWVRQSPGKGLEWVARIRSQSNNYTTYYADSVKDRFTISRDDSQSMLYLQMNNLKTEDTAIYYCVRQMGDYWGQGTTLTVSS

SEQ ID NO: 508 - protein, 125 aa, Synthetic construct
EVQLVESGGGLVQPGGSLRLSCAASGFTFSTYAMNWVRQAPGKGLEWVGRIRSKYNNYATYYADSVKGRFTISRDDSKNSLYLQMNSLKTEDTAVYYCVRHGNFGNSYVTWFAYWGQGTLVTVSS

SEQ ID NO: 509 - protein, 125 aa, Synthetic construct
EVQLVESGGGLVQPGGSLRLSCAASGFTFSTYAMNWVRQAPGKGLEWVGRIRSKYNNYATYYADSVKGRFTISRDDSKNSLYLQMNSLKTEDTAVYYCVRHKNFGNSYVTWFAYWGQGTLVTVSS

SEQ ID NO: 510 - protein, 113 aa, Synthetic construct
GGGLVQPKGSLKLSCAASGFTFNTYAMNWVRQAPGKGLEWVARIRSKSNNYATYYADSVKDRFTISRDDSQSMLYLQMNNLKTEDTAMYYCVRHDGVAWFAYWGQGTLVTVSA

SEQ ID NO: 511 - protein, 118 aa, Synthetic construct
EVQLVESGGGLVQPKGSLKLSCAASGFDFKTYAMSWVRQAPGKGLDWIVTISTKGHNYATLYADSVKERFTISRDDSQSMVYLQMNNLKTEDTALYYCTVAGYNFDYWGQGVMVTVSS

SEQ ID NO: 512 - protein, 125 aa, Synthetic construct
EVQLVESGGGLVQPGGSLKLSCAASGFTFNTYAMNWVRQAPGKGLEWVARIRSKYNNYATYYADSVKDRFTISRDDSKNTAYLQMNNLKTEDTAVYYCVRHGNFGNSYVSWFAYWGQGTLVTVSS

SEQ ID NO: 513 - protein, 129 aa, Synthetic construct
EVQLEVQLVESGGGLVQPGGSLRLSCAASGFTFSTYAMNWVRQAPGKGLEWVGRIRSKYNNYATYYADSVKDRFTISRDDSKNSLYLQMNSLKTEDTAVYYCVRHGNFGNSYVSWFAYWGQGTLVTVSS

SEQ ID NO: 514 - protein, 135 aa, Synthetic construct
EVQLEVQLEVQLVESGGGLVQPGGSLTLSCAASGRTFSSYAMGWFRQAPGKEREFVVAINWASGSTYYADSVKGRFTISRDNSKNTLYLQMNSLRAEDTAVYYCAAGYQINSGNYNFKDYEYDYWGQGTLVTVSS

SEQ ID NO: 515 - protein, 131 aa, Synthetic construct
EVQLEVQLVESGGGLVQPGGSLTLSCAASGRTFSSYAMGWFRQAPGKEREFVVAINWASGSTYYADSVKGRFTISRDNSKNTLYLQMNSLRAEDTAVYYCAAGYQINSGNYNFKDYEYDYWGQGTLVTVSS

SEQ ID NO: 516 - protein, 119 aa, Synthetic construct
EVQLEVQLEVQLVESGGGLVQPGGSLTLSCAASRFMISEYHMHWVRQAPGKGLEWVSTINPAGTTDYAESVKGRFTISRDNAKNTLYLQMNSLKPEDTAVYYCDSYGYRGQGTQVTVSS

SEQ ID NO: 517 - protein, 115 aa, Synthetic construct
EVQLEVQLVESGGGLVQPGGSLTLSCAASRFMISEYHMHWVRQAPGKGLEWVSTINPAGTTDYAESVKGRFTISRDNAKNTLYLQMNSLKPEDTAVYYCDSYGYRGQGTQVTVSS

SEQ ID NO: 518 - protein, 133 aa, Synthetic construct
EVQLEVQLEVQLVESGGGLVQPGGSLKLSCAASGFTFNKYAMNWVRQAPGKGLEWVARIRSKYNNYATYYADSVKDRFTISRDDSKNTAYLQMNNLKTEDTAVYYCVRHGNFGNSYISYWAYWGQGTLVTVSS

SEQ ID NO: 519 - protein, 129 aa, Synthetic construct
EVQLEVQLVESGGGLVQPGGSLKLSCAASGNTFNKYAMNWVRQAPGKGLEWVARIRSKYNNYATYYADSVKDRFTISRDDSKNTAYLQMNNLKTEDTAVYYCVRHGNFGDSYISYWAYWGQGTLVTVSS

SEQ ID NO: 520 - protein, 122 aa, Synthetic construct
EVQLVESGGGLVQPKGSLKLSCAASGFTFNTYAMNWVRQAPGKGLEWVARIRSKSNNYATYYADSVKDRFTISRDDSQSMLYLQMNNLKTEDTAMYYCVRQWDYDVRAMNYWGQGTSVTVSS

SEQ ID NO: 521 - protein, 120 aa, Synthetic construct
EVKLEESGGGLVQPKGSLKLSCAASGFTFNTYAVHWVRQAPGKGMEWVARIRSKSGNYATYYADSVKDRFTISRNDSQSMLYLQMNNLKTEDTAIYYCVRAGNNGAFPYWGQGTTVTVSS

SEQ ID NO: 522 - protein, 115 aa, Synthetic construct
EVQLVESGGGLVQPKGTLKLSCAASGFSFNTYAMNWVRQAPGKSLEWVARTLSKSNNYATYYADSVKDRFTISRDDSQSMLSLQMNNLKTEDTAMYYCVGAFAYWGQGTLVTVSA

SEQ ID NO: 523 - protein, 120 aa, Synthetic construct
EVQPVESGGGLVQPKGSLKLSCAASGFTFNTYAMHWVRQAPGKGLEWVARIRSKSNNYAKNYDDSVKDRFTISRDDSQSMLYLQMNNLKTEDTAMYYCVRENYGGRFDYWGQGTTLTVSS

SEQ ID NO: 524 - protein, 142 aa, Synthetic construct
MDMRVPAQLLGLLLLWLPGAKCEVQPVESGGGLVQPKGSLKLSCAASGFTFNTYAMHWVRQAPGKGLEWVARIRSKSNNYAKNYDDSVKDRFTISRDDSQSMLYLQMNNLKTEDTAMYYCVRENYGGRFDYWGQGTLVTVSS

SEQ ID NO: 525 - protein, 125 aa, Synthetic construct
EVQLLESGGGLVQPGGSLRLSCAASGFTFSTYAMNWVRQAPGKGLEWVSRIRSKYNNYATYYADSVKDRFTISRDDSKNTLYLQMNSLRAEDTAVYYCVRHGNFGNSYVSWFAYWGQGTLVTVSS

SEQ ID NO: 526 - protein, 124 aa, Synthetic construct
EVQLEVQLVESGGGLVKPGGSLRLSCAASGFTFSNAWMSWVRQAPGKGLEWVGRIKSKTDGGTTDYAAPVKGRFTISRDDSKNTLYLQMNSLKTEDTAVYYCTTPWEWSWYDYWGQGTLVTVSS

SEQ ID NO: 527 - protein, 129 aa, Synthetic construct
EVQLEVQLLESGGGLVQPGGSLRLSCAASGFTFSTYAMNWVRQAPGKGLEWVSRIRSKYNNYATYYADSVKGRFTISRDDSKNTLYLQMNSLRAEDTAVYYCVRHGNFGASYVSWFAYWGQGTLVTVSS

SEQ ID NO: 528 - protein, 129 aa, Synthetic construct
EVQLEVQLLESGGGLVQPGGSLRLSCAASGFTFSTYAMNWVRQAPGKGLEWVSRIRSKYNNYATYYADSVKGRFTISRDDSKNTLYLQMNSLRAEDTAVYYCVRHGNFGNAYVSWFAYWGQGTLVTVSS

SEQ ID NO: 529 - protein, 125 aa, Synthetic construct
EVQLLESGGGLVQPGGSLRLSCAASGFTFSTYAMNWVRQAPGKGLEWVSRIRSKYNNYATYYADSVKGRFTISRDDSKNTLYLQMNSLRAEDTAVYYCVRHGNFGASYVSWFAYWGQGTLVTVSS

SEQ ID NO: 530 - protein, 125 aa, Synthetic construct
EVQLLESGGGLVQPGGSLRLSCAASGFTFSTYAMNWVRQAPGKGLEWVSRIRSKYNNYATYYADSVKGRFTISRDDSKNTLYLQMNSLRAEDTAVYYCVRHGNFGNAYVSWFAYWGQGTLVTVSS

SEQ ID NO: 531 - protein, 125 aa, Synthetic construct
EVQLVESGGGLVQPGGSLKLSCAASGFTFNKYAMNWVRQAPGKGLEWVARIRSKYNNYATYYADSVKDRFTISRDDSKNTAYLQMNNLKTEDTAVYYCVRHGNFGNSYISYWAYCGQGTLVTVSS

SEQ ID NO: 532 - protein, 119 aa, Synthetic construct
EVQLVETGGGLVQPEGSLKLSCAASGFSFNINAMNWVRQAPGKGLEWVARIRSESNNYATYYGDSVKDRFTISRDDSQNMLYLQMNNLKTEDTAIYYCVREVTTSFAYWGQGTLVTVSA

SEQ ID NO: 533 - protein, 123 aa, Synthetic construct
EVQLVETGGGLVQPKGSLKLSCAASGFTFNASAMNWVRQAPGKGLEWVARIRSKSNNYAIYYADSVKDRFTISRDDSQSMLYLQMNNLKTEDTAMYYCVRDPGYYGNPWFAYWGQGTLVTVSA

SEQ ID NO: 534 - protein, 122 aa, Synthetic construct
EVQLVESGGGLVKPGGSLRLSCAASGFTFSNYWMNWVRQAPGKGLEWVGEIRLKSNNYATHYAEPVKGRFTISRDDSSSTVYLQMNSLKTEDTAVYYCTRYYGNYGGYFDVWGAGTLVTVSS

SEQ ID NO: 535 - protein, 122 aa, Synthetic construct
EVQLVESGGGLVKPGGSLRLSCAASGFTFSNYWMNWVRQAPGKGLEWVGEIRLKSNNYATHYAEPVKGRFTISRDDSKSMVYLQMNSLKTEDTAVYYCTRYYGNYGGYFDVWGAGTLVTVSS

SEQ ID NO: 536 - protein, 122 aa, Synthetic construct
EVQLVESGGGLVKPGGSLRLSCAASGFTFSNYWMNWVRQAPGKGLEWVGEIRLKSNNYATHYAEPVKGRFTISRDDSKSQVYLQMNSLKTEDTAVYYCTRYYGNYGGYFDVWGAGTLVTVSS

SEQ ID NO: 537 - protein, 122 aa, Synthetic construct
EVQLVESGGGLVKPGGSLRLSCAASGFTFSNYWMNWVRQAPGKGLEWVGEIRLKSNNYATHYAEPVKGRFTISRDDSKSTVYLQMNSLKTEDTAVYYCTRYYGNYGGYFDVWGRGTLVTVSS

SEQ ID NO: 538 - protein, 122 aa, Synthetic construct
EVQLVESGGGLVKPGGSLRLSCAASGFTFSNYWMNWVRQAPGKGLEWVGEIRLKSNNYATHYAQPVKDRFTISRDDSKSTVYLQMNSLKTEDTAVYYCTRYYGNYGGYFDVWGAGTLVTVSS

SEQ ID NO: 539 - protein, 122 aa, Synthetic construct
EVQLVESGGGLVKPGGSLRLSCAASGFTFSNYWMNWVRQAPGKGLEWVGEIRLYSNNYATHYAEPVKGRFTISRDDSKSTLYLQMNSLKTEDTAVYYCTRYYGNYGGYFDVWGAGTLVTVSS

SEQ ID NO: 540 - protein, 122 aa, Synthetic construct
EVQLVESGGGLVKPGGSLRLSCAASGFTFSNFWMNWVRQAPGKGLEWVGEIRWKSNNYATHYAEPVKGRFTISRDDSKSTLYLQMNSLKTEDTAVYYCTRYYGNYGGYFDVWGAGTLVTVSS

SEQ ID NO: 541 - protein, 122 aa, Synthetic construct
EVQLVESGGGLVKPGGSLRLSCAASGFTFSNFWMNWVRQAPGKGLEWVGEIRLKKNNYATHYAEPVKGRFTISRDDSKSTLYLQMNSLKTEDTAVYYCTRYYGNYGGYFDVWGAGTLVTVSS

SEQ ID NO: 542 - protein, 122 aa, Synthetic construct
EVQLVESGGGLVQPGGSLKLSCAASGFTFSNYWMNWVRQAPGKGLEWVGEIRLKSNNYATHYAASVKGRFTISRDDSKSTLYLQMNSLKTEDTAVYYCTRYYGNYGGYFDVWGQGTLVTVSS

SEQ ID NO: 543 - protein, 122 aa, Synthetic construct
EVQLVESGGGLVKPGGSLKLSCAASGFTFSNYWMNWVRQAPGKGLEWVGEIRLKSNNYATHYADSVKGRFTISRDDSKSTLYLQMNSLKTEDTAVYYCTRYYGNYGGYFDVWGQGTLVTVSS

SEQ ID NO: 544 - protein, 122 aa, Synthetic construct
EVQLVESGGGLVKPGGSLRLSCAASGFTFSNYWMNWVRQAPGKGLEWVGEIRLKSNNYATHYAEPVKGRFTISRDDSKSTVYLQMNSLKTEDTAVYYCTRYYGNYGGYFDVWGAGTLVTVSS

SEQ ID NO: 545 - protein, 122 aa, Synthetic construct
EVQLVESGGGLVKPGGSLRLSCAASGFTFSNYWMNWVRQAPGKGLEWVGEIRLKSNNYATDYAEPVKGRFTISRDDSKSTVYLQMNSLKTEDTAVYYCTRYYGNYGGYFDVWGAGTLVTVSS

SEQ ID NO: 546 - protein, 122 aa, Synthetic construct
EVQLVESGGGLVKPGGSLRLSCVASGFTFSNYWMNWVRQAPGKGLEWVAEIRLYSNNYATHYAESVKGRFTISRDDSKSMLYLQMNNLKTEDTGVYYCTRYYGNYGGYFDVWGRGTLVTVSS

SEQ ID NO: 547 - protein, 122 aa, Synthetic construct
EVQLVESGGGLVKPGGSLRLTCVASGFTFSNYWMNWVRQAPGKGLEWVAEIRLYSNNYATHYAESVKGRFTISRDDSKSMLYLQMNNLKTEDTGVYYCTRYYGNYGGYFDVWGRGTLVTVSS

SEQ ID NO: 548 - protein, 122 aa, Synthetic construct
EVQLVESGGGLVKPGGSLRLSCVASGFTFSNYWMNWVRQAPGKGLEWVCEIRLYSNNYATHYAESVKGRFTCSRDDSKSTLYLQMNNLKTEDTGVYYCTRYYGNYGGYFDVWGQGTLVTVSS

SEQ ID NO: 549 - protein, 122 aa, Synthetic construct
EVQLVESGGGLVKPGGSLRLSCVASGFTFSNYWMNWVRQAPGKGLEWVAEIRLYSDNYATHYAESVKGRFTISRDDSKSTLYLQMNNLKTEDTGVYYCTRYYGNYGGYFDVWGQGTLVTVSS

SEQ ID NO: 550 - protein, 122 aa, Synthetic construct
EVQLVESGGGLVKPGGSLRLSCVASGFTFSNYWMNWVRQAPGKCLEWVAEIRLYSNNYATHYAESVKGRFTISRDDSKSTLYLQMNNLKTEDTGVYYCTRYYGNYGGYFDVWGQGTLVTVSS

SEQ ID NO: 551 - protein, 122 aa, Synthetic construct
EVQLVESGGGLVQPGGSLRLSCAASGFTFSNYWMNWVRQAPGKGLEWVGEIRLKSNNYATHYAEPVKGRFTISRDDSKSTVYLQMNSLKTEDTAVYYCTRYYGNYGGYFDVWGAGTLVTVSS

SEQ ID NO: 552 - protein, 122 aa, Synthetic construct
EVQLVESGGGLVRPGGSLRLSCAASGFTFSNYWMNWVRQAPGKGLEWVGEIRLKSNNYATHYAEPVKGRFTISRDDSKSTVYLQMNSLKTEDTAVYYCTRYYGNYGGYFDVWGAGTLVTVSS

SEQ ID NO: 553 - protein, 122 aa, Synthetic construct
EVQLVESGGGLVKPGGSLKLSCAASGFTFSNYWMNWVRQAPGKGLEWVGEIRLKSNNYATHYAEPVKGRFTISRDDSKSTVYLQMNSLKTEDTAVYYCTRYYGNYGGYFDVWGAGTLVTVSS

SEQ ID NO: 554 - protein, 122 aa, Synthetic construct
EVQLVESGGGLVKPGGSLRLSCAASGFTFTNYWMNWVRQAPGKGLEWVGEIRLKSNNYATHYAEPVKGRFTISRDDSKSTVYLQMNSLKTEDTAVYYCTRYYGNYGGYFDVWGAGTLVTVSS

SEQ ID NO: 555 - protein, 122 aa, Synthetic construct
EVQLVESGGGLVKPGGSLRLSCAASGFTFANYWMNWVRQAPGKGLEWVGEIRLKSNNYATHYAEPVKGRFTISRDDSKSTVYLQMNSLKTEDTAVYYCTRYYGNYGGYFDVWGAGTLVTVSS

SEQ ID NO: 556 - protein, 122 aa, Synthetic construct
EVQLVESGGGLVKPGGSLRLSCAASGFTFQNYWMNWVRQAPGKGLEWVGEIRLKSNNYATHYAEPVKGRFTISRDDSKSTVYLQMNSLKTEDTAVYYCTRYYGNYGGYFDVWGAGTLVTVSS

SEQ ID NO: 557 - protein, 122 aa, Synthetic construct
EVQLVESGGGLVKPGGSLRLSCAASGFTFGNYWMNWVRQAPGKGLEWVGEIRLKSNNYATHYAEPVKGRFTISRDDSKSTVYLQMNSLKTEDTAVYYCTRYYGNYGGYFDVWGAGTLVTVSS

SEQ ID NO: 558 - protein, 122 aa, Synthetic construct
EVQLVESGGGLVKPGGSLRLSCAASGFTFVNYWMNWVRQAPGKGLEWVGEIRLKSNNYATHYAEPVKGRFTISRDDSKSTVYLQMNSLKTEDTAVYYCTRYYGNYGGYFDVWGAGTLVTVSS

SEQ ID NO: 559 - protein, 122 aa, Synthetic construct
EVQLVESGGGLVKPGGSLRLSCAASGFTFHNYWMNWVRQAPGKGLEWVGEIRLKSNNYATHYAEPVKGRFTISRDDSKSTVYLQMNSLKTEDTAVYYCTRYYGNYGGYFDVWGAGTLVTVSS

SEQ ID NO: 560 - protein, 122 aa, Synthetic construct
EVQLVESGGGLVKPGGSLRLSCAASGFTFDNYWMNWVRQAPGKGLEWVGEIRLKSNNYATHYAEPVKGRFTISRDDSKSTVYLQMNSLKTEDTAVYYCTRYYGNYGGYFDVWGAGTLVTVSS

SEQ ID NO: 561 - protein, 122 aa, Synthetic construct
EVQLVESGGGLVKPGGSLRLSCAASGFTFKNYWMNWVRQAPGKGLEWVGEIRLKSNNYATHYAEPVKGRFTISRDDSKSTVYLQMNSLKTEDTAVYYCTRYYGNYGGYFDVWGAGTLVTVSS

SEQ ID NO: 562 - protein, 122 aa, Synthetic construct
EVQLVESGGGLVKPGGSLRLSCAASGFTFYNYWMNWVRQAPGKGLEWVGEIRLKSNNYATHYAEPVKGRFTISRDDSKSTVYLQMNSLKTEDTAVYYCTRYYGNYGGYFDVWGAGTLVTVSS

SEQ ID NO: 563 - protein, 122 aa, Synthetic construct
EVQLVESGGGLVKPGGSLRLSCAASGFTFSDYWMNWVRQAPGKGLEWVGEIRLKSNNYATHYAEPVKGRFTISRDDSKSTVYLQMNSLKTEDTAVYYCTRYYGNYGGYFDVWGAGTLVTVSS

SEQ ID NO: 564 - protein, 122 aa, Synthetic construct
EVQLVESGGGLVKPGGSLRLSCAASGFTFSHYWMNWVRQAPGKGLEWVGEIRLKSNNYATHYAEPVKGRFTISRDDSKSTVYLQMNSLKTEDTAVYYCTRYYGNYGGYFDVWGAGTLVTVSS

SEQ ID NO: 565 - protein, 122 aa, Synthetic construct
EVQLVESGGGLVKPGGSLRLSCAASGFTFSEYWMNWVRQAPGKGLEWVGEIRLKSNNYATHYAEPVKGRFTISRDDSKSTVYLQMNSLKTEDTAVYYCTRYYGNYGGYFDVWGAGTLVTVSS

SEQ ID NO: 566 - protein, 122 aa, Synthetic construct
EVQLVESGGGLVKPGGSLRLSCAASGFTFSSYWMNWVRQAPGKGLEWVGEIRLKSNNYATHYAEPVKGRFTISRDDSKSTVYLQMNSLKTEDTAVYYCTRYYGNYGGYFDVWGAGTLVTVSS

SEQ ID NO: 567 - protein, 122 aa, Synthetic construct
EVQLVESGGGLVKPGGSLRLSCAASGFTFSRYWMNWVRQAPGKGLEWVGEIRLKSNNYATHYAEPVKGRFTISRDDSKSTVYLQMNSLKTEDTAVYYCTRYYGNYGGYFDVWGAGTLVTVSS

SEQ ID NO: 568 - protein, 122 aa, Synthetic construct
EVQLVESGGGLVKPGGSLRLSCAASGFTFSLYWMNWVRQAPGKGLEWVGEIRLKSNNYATHYAEPVKGRFTISRDDSKSTVYLQMNSLKTEDTAVYYCTRYYGNYGGYFDVWGAGTLVTVSS

SEQ ID NO: 569 - protein, 122 aa, Synthetic construct
EVQLVESGGGLVKPGGSLRLSCAASGFTFSTYWMNWVRQAPGKGLEWVGEIRLKSNNYATHYAEPVKGRFTISRDDSKSTVYLQMNSLKTEDTAVYYCTRYYGNYGGYFDVWGAGTLVTVSS

SEQ ID NO: 570 - protein, 122 aa, Synthetic construct
EVQLVESGGGLVKPGGSLRLSCAASGFTFSGYWMNWVRQAPGKGLEWVGEIRLKSNNYATHYAEPVKGRFTISRDDSKSTVYLQMNSLKTEDTAVYYCTRYYGNYGGYFDVWGAGTLVTVSS

SEQ ID NO: 571 - protein, 122 aa, Synthetic construct
EVQLVESGGGLVKPGGSLRLSCAASGFTFSYYWMNWVRQAPGKGLEWVGEIRLKSNNYATHYAEPVKGRFTISRDDSKSTVYLQMNSLKTEDTAVYYCTRYYGNYGGYFDVWGAGTLVTVSS

SEQ ID NO: 572 - protein, 122 aa, Synthetic construct
EVQLVESGGGLVKPGGSLRLSCAASGFTFSNYGMNWVRQAPGKGLEWVGEIRLKSNNYATHYAEPVKGRFTISRDDSKSTVYLQMNSLKTEDTAVYYCTRYYGNYGGYFDVWGAGTLVTVSS

SEQ ID NO: 573 - protein, 122 aa, Synthetic construct
EVQLVESGGGLVKPGGSLRLSCAASGFTFSNYAMNWVRQAPGKGLEWVGEIRLKSNNYATHYAEPVKGRFTISRDDSKSTVYLQMNSLKTEDTAVYYCTRYYGNYGGYFDVWGAGTLVTVSS

SEQ ID NO: 574 - protein, 122 aa, Synthetic construct
EVQLVESGGGLVKPGGSLRLSCAASGFTFSNYYMNWVRQAPGKGLEWVGEIRLKSNNYATHYAEPVKGRFTISRDDSKSTVYLQMNSLKTEDTAVYYCTRYYGNYGGYFDVWGAGTLVTVSS

SEQ ID NO: 575 - protein, 122 aa, Synthetic construct
EVQLVESGGGLVKPGGSLRLSCAASGFTFSNYDMNWVRQAPGKGLEWVGEIRLKSNNYATHYAEPVKGRFTISRDDSKSTVYLQMNSLKTEDTAVYYCTRYYGNYGGYFDVWGAGTLVTVSS

SEQ ID NO: 576 - protein, 122 aa, Synthetic construct
EVQLVESGGGLVKPGGSLRLSCAASGFTFSNYWMNWVRQAPGKGLEWVAEIRLKSNNYATHYAEPVKGRFTISRDDSKSTVYLQMNSLKTEDTAVYYCTRYYGNYGGYFDVWGAGTLVTVSS

SEQ ID NO: 577 - protein, 122 aa, Synthetic construct
EVQLVESGGGLVKPGGSLRLSCAASGFTFSNYWMNWVRQAPGKGLEWVSEIRLKSNNYATHYAEPVKGRFTISRDDSKSTVYLQMNSLKTEDTAVYYCTRYYGNYGGYFDVWGAGTLVTVSS

SEQ ID NO: 578 - protein, 122 aa, Synthetic construct
EVQLVESGGGLVKPGGSLRLSCAASGFTFSNYWMNWVRQAPGKGLEWVGQIRLKSNNYATHYAEPVKGRFTISRDDSKSTVYLQMNSLKTEDTAVYYCTRYYGNYGGYFDVWGAGTLVTVSS

SEQ ID NO: 579 - protein, 122 aa, Synthetic construct
EVQLVESGGGLVKPGGSLRLSCAASGFTFSNYWMNWVRQAPGKGLEWVGDIRLKSNNYATHYAEPVKGRFTISRDDSKSTVYLQMNSLKTEDTAVYYCTRYYGNYGGYFDVWGAGTLVTVSS

SEQ ID NO: 580 - protein, 122 aa, Synthetic construct
EVQLVESGGGLVKPGGSLRLSCAASGFTFSNYWMNWVRQAPGKGLEWVGKIRLKSNNYATHYAEPVKGRFTISRDDSKSTVYLQMNSLKTEDTAVYYCTRYYGNYGGYFDVWGAGTLVTVSS

SEQ ID NO: 581 - protein, 122 aa, Synthetic construct
EVQLVESGGGLVKPGGSLRLSCAASGFTFSNYWMNWVRQAPGKGLEWVGSIRLKSNNYATHYAEPVKGRFTISRDDSKSTVYLQMNSLKTEDTAVYYCTRYYGNYGGYFDVWGAGTLVTVSS

SEQ ID NO: 582 - protein, 122 aa, Synthetic construct
EVQLVESGGGLVKPGGSLRLSCAASGFTFSNYWMNWVRQAPGKGLEWVGHIRLKSNNYATHYAEPVKGRFTISRDDSKSTVYLQMNSLKTEDTAVYYCTRYYGNYGGYFDVWGAGTLVTVSS

SEQ ID NO: 583 - protein, 122 aa, Synthetic construct
EVQLVESGGGLVKPGGSLRLSCAASGFTFSNYWMNWVRQAPGKGLEWVGAIRLKSNNYATHYAEPVKGRFTISRDDSKSTVYLQMNSLKTEDTAVYYCTRYYGNYGGYFDVWGAGTLVTVSS

SEQ ID NO: 584 - protein, 122 aa, Synthetic construct
EVQLVESGGGLVKPGGSLRLSCAASGFTFSNYWMNWVRQAPGKGLEWVGGIRLKSNNYATHYAEPVKGRFTISRDDSKSTVYLQMNSLKTEDTAVYYCTRYYGNYGGYFDVWGAGTLVTVSS

SEQ ID NO: 585 - protein, 122 aa, Synthetic construct
EVQLVESGGGLVKPGGSLRLSCAASGFTFSNYWMNWVRQAPGKGLEWVGYIRLKSNNYATHYAEPVKGRFTISRDDSKSTVYLQMNSLKTEDTAVYYCTRYYGNYGGYFDVWGAGTLVTVSS

SEQ ID NO: 586 - protein, 122 aa, Synthetic construct
EVQLVESGGGLVKPGGSLRLSCAASGFTFSNYWMNWVRQAPGKGLEWVGIIRLKSNNYATHYAEPVKGRFTISRDDSKSTVYLQMNSLKTEDTAVYYCTRYYGNYGGYFDVWGAGTLVTVSS

SEQ ID NO: 587 - protein, 122 aa, Synthetic construct
EVQLVESGGGLVKPGGSLRLSCAASGFTFSNYWMNWVRQAPGKGLEWVGEIRIKSNNYATHYAEPVKGRFTISRDDSKSTVYLQMNSLKTEDTAVYYCTRYYGNYGGYFDVWGAGTLVTVSS

SEQ ID NO: 588 - protein, 122 aa, Synthetic construct
EVQLVESGGGLVKPGGSLRLSCAASGFTFSNYWMNWVRQAPGKGLEWVGEIRFKSNNYATHYAEPVKGRFTISRDDSKSTVYLQMNSLKTEDTAVYYCTRYYGNYGGYFDVWGAGTLVTVSS

SEQ ID NO: 589 - protein, 122 aa, Synthetic construct
EVQLVESGGGLVKPGGSLRLSCAASGFTFSNYWMNWVRQAPGKGLEWVGEIRVKSNNYATHYAEPVKGRFTISRDDSKSTVYLQMNSLKTEDTAVYYCTRYYGNYGGYFDVWGAGTLVTVSS

SEQ ID NO: 590 - protein, 122 aa, Synthetic construct
EVQLVESGGGLVKPGGSLRLSCAASGFTFSNYWMNWVRQAPGKGLEWVGEIRYKSNNYATHYAEPVKGRFTISRDDSKSTVYLQMNSLKTEDTAVYYCTRYYGNYGGYFDVWGAGTLVTVSS

SEQ ID NO: 591 - protein, 122 aa, Synthetic construct
EVQLVESGGGLVKPGGSLRLSCAASGFTFSNYWMNWVRQAPGKGLEWVGEIRWKSNNYATHYAEPVKGRFTISRDDSKSTVYLQMNSLKTEDTAVYYCTRYYGNYGGYFDVWGAGTLVTVSS

SEQ ID NO: 592 - protein, 122 aa, Synthetic construct
EVQLVESGGGLVKPGGSLRLSCAASGFTFSNYWMNWVRQAPGKGLEWVGEIRDKSNNYATHYAEPVKGRFTISRDDSKSTVYLQMNSLKTEDTAVYYCTRYYGNYGGYFDVWGAGTLVTVSS

SEQ ID NO: 593 - protein, 122 aa, Synthetic construct
EVQLVESGGGLVKPGGSLRLSCAASGFTFSNYWMNWVRQAPGKGLEWVGEIRAKSNNYATHYAEPVKGRFTISRDDSKSTVYLQMNSLKTEDTAVYYCTRYYGNYGGYFDVWGAGTLVTVSS

SEQ ID NO: 594 - protein, 122 aa, Synthetic construct
EVQLVESGGGLVKPGGSLRLSCAASGFTFSNYWMNWVRQAPGKGLEWVGEIRQKSNNYATHYAEPVKGRFTISRDDSKSTVYLQMNSLKTEDTAVYYCTRYYGNYGGYFDVWGAGTLVTVSS

SEQ ID NO: 595 - protein, 122 aa, Synthetic construct
EVQLVESGGGLVKPGGSLRLSCAASGFTFSNYWMNWVRQAPGKGLEWVGEIRKKSNNYATHYAEPVKGRFTISRDDSKSTVYLQMNSLKTEDTAVYYCTRYYGNYGGYFDVWGAGTLVTVSS

SEQ ID NO: 596 - protein, 122 aa, Synthetic construct
EVQLVESGGGLVKPGGSLRLSCAASGFTFSNYWMNWVRQAPGKGLEWVGEIRLKTNNYATHYAEPVKGRFTISRDDSKSTVYLQMNSLKTEDTAVYYCTRYYGNYGGYFDVWGAGTLVTVSS

SEQ ID NO: 597 - protein, 122 aa, Synthetic construct
EVQLVESGGGLVKPGGSLRLSCAASGFTFSNYWMNWVRQAPGKGLEWVGEIRLKANNYATHYAEPVKGRFTISRDDSKSTVYLQMNSLKTEDTAVYYCTRYYGNYGGYFDVWGAGTLVTVSS

SEQ ID NO: 598 - protein, 122 aa, Synthetic construct
EVQLVESGGGLVKPGGSLRLSCAASGFTFSNYWMNWVRQAPGKGLEWVGEIRLKQNNYATHYAEPVKGRFTISRDDSKSTVYLQMNSLKTEDTAVYYCTRYYGNYGGYFDVWGAGTLVTVSS

SEQ ID NO: 599 - protein, 122 aa, Synthetic construct
EVQLVESGGGLVKPGGSLRLSCAASGFTFSNYWMNWVRQAPGKGLEWVGEIRLKGNNYATHYAEPVKGRFTISRDDSKSTVYLQMNSLKTEDTAVYYCTRYYGNYGGYFDVWGAGTLVTVSS

SEQ ID NO: 600 - protein, 122 aa, Synthetic construct
EVQLVESGGGLVKPGGSLRLSCAASGFTFSNYWMNWVRQAPGKGLEWVGEIRLKVNNYATHYAEPVKGRFTISRDDSKSTVYLQMNSLKTEDTAVYYCTRYYGNYGGYFDVWGAGTLVTVSS

SEQ ID NO: 601 - protein, 122 aa, Synthetic construct
EVQLVESGGGLVKPGGSLRLSCAASGFTFSNYWMNWVRQAPGKGLEWVGEIRLKHNNYATHYAEPVKGRFTISRDDSKSTVYLQMNSLKTEDTAVYYCTRYYGNYGGYFDVWGAGTLVTVSS

SEQ ID NO: 602 - protein, 122 aa, Synthetic construct
EVQLVESGGGLVKPGGSLRLSCAASGFTFSNYWMNWVRQAPGKGLEWVGEIRLKDNNYATHYAEPVKGRFTISRDDSKSTVYLQMNSLKTEDTAVYYCTRYYGNYGGYFDVWGAGTLVTVSS

SEQ ID NO: 603 - protein, 122 aa, Synthetic construct
EVQLVESGGGLVKPGGSLRLSCAASGFTFSNYWMNWVRQAPGKGLEWVGEIRLKKNNYATHYAEPVKGRFTISRDDSKSTVYLQMNSLKTEDTAVYYCTRYYGNYGGYFDVWGAGTLVTVSS

SEQ ID NO: 604 - protein, 122 aa, Synthetic construct
EVQLVESGGGLVKPGGSLRLSCAASGFTFSNYWMNWVRQAPGKGLEWVGEIRLKYNNYATHYAEPVKGRFTISRDDSKSTVYLQMNSLKTEDTAVYYCTRYYGNYGGYFDVWGAGTLVTVSS

SEQ ID NO: 605 - protein, 122 aa, Synthetic construct
EVQLVESGGGLVKPGGSLRLSCAASGFTFSNYWMNWVRQAPGKGLEWVGEIRLKSNNYATYYAEPVKGRFTISRDDSKSTVYLQMNSLKTEDTAVYYCTRYYGNYGGYFDVWGAGTLVTVSS

SEQ ID NO: 606 - protein, 122 aa, Synthetic construct
EVQLVESGGGLVKPGGSLRLSCAASGFTFSNYWMNWVRQAPGKGLEWVGEIRLKSNNYATQYAEPVKGRFTISRDDSKSTVYLQMNSLKTEDTAVYYCTRYYGNYGGYFDVWGAGTLVTVSS

SEQ ID NO: 607 - protein, 122 aa, Synthetic construct
EVQLVESGGGLVKPGGSLRLSCAASGFTFSNYWMNWVRQAPGKGLEWVGEIRLKSNNYATFYAEPVKGRFTISRDDSKSTVYLQMNSLKTEDTAVYYCTRYYGNYGGYFDVWGAGTLVTVSS

SEQ ID NO: 608 - protein, 122 aa, Synthetic construct
EVQLVESGGGLVKPGGSLRLSCAASGFTFSNYWMNWVRQAPGKGLEWVGEIRLKSNNYATAYAEPVKGRFTISRDDSKSTVYLQMNSLKTEDTAVYYCTRYYGNYGGYFDVWGAGTLVTVSS

SEQ ID NO: 609 - protein, 122 aa, Synthetic construct
EVQLVESGGGLVKPGGSLRLSCAASGFTFSNYWMNWVRQAPGKGLEWVGEIRLKSNNYATTYAEPVKGRFTISRDDSKSTVYLQMNSLKTEDTAVYYCTRYYGNYGGYFDVWGAGTLVTVSS

SEQ ID NO: 610 - protein, 122 aa, Synthetic construct
EVQLVESGGGLVKPGGSLRLSCAASGFTFSNYWMNWVRQAPGKGLEWVGEIRLKSNNYATKYAEPVKGRFTISRDDSKSTVYLQMNSLKTEDTAVYYCTRYYGNYGGYFDVWGAGTLVTVSS

SEQ ID NO: 611 - protein, 122 aa, Synthetic construct
EVQLVESGGGLVKPGGSLRLSCAASGFTFSNYWMNWVRQAPGKGLEWVGEIRLKSNNYATGYAEPVKGRFTISRDDSKSTVYLQMNSLKTEDTAVYYCTRYYGNYGGYFDVWGAGTLVTVSS

SEQ ID NO: 612 - protein, 122 aa, Synthetic construct
EVQLVESGGGLVKPGGSLRLSCAASGFTFSNYWMNWVRQAPGKGLEWVGEIRLKSNNYATLYAEPVKGRFTISRDDSKSTVYLQMNSLKTEDTAVYYCTRYYGNYGGYFDVWGAGTLVTVSS

SEQ ID NO: 613 - protein, 122 aa, Synthetic construct
EVQLVESGGGLVKPGGSLRLSCAASGFTFSNYWMNWVRQAPGKGLEWVGEIRLKSNNYATHYADPVKGRFTISRDDSKSTVYLQMNSLKTEDTAVYYCTRYYGNYGGYFDVWGAGTLVTVSS

SEQ ID NO: 614 - protein, 122 aa, Synthetic construct
EVQLVESGGGLVKPGGSLRLSCAASGFTFSNYWMNWVRQAPGKGLEWVGEIRLKSNNYATHYAGPVKGRFTISRDDSKSTVYLQMNSLKTEDTAVYYCTRYYGNYGGYFDVWGAGTLVTVSS

SEQ ID NO: 615 - protein, 122 aa, Synthetic construct
EVQLVESGGGLVKPGGSLRLSCAASGFTFSNYWMNWVRQAPGKGLEWVGEIRLKSNNYATHYAAPVKGRFTISRDDSKSTVYLQMNSLKTEDTAVYYCTRYYGNYGGYFDVWGAGTLVTVSS

SEQ ID NO: 616 - protein, 122 aa, Synthetic construct
EVQLVESGGGLVKPGGSLRLSCAASGFTFSNYWMNWVRQAPGKGLEWVGEIRLKSNNYATHYAESVKGRFTISRDDSKSTVYLQMNSLKTEDTAVYYCTRYYGNYGGYFDVWGAGTLVTVSS

SEQ ID NO: 617 - protein, 122 aa, Synthetic construct
EVQLVESGGGLVKPGGSLRLSCAASGFTFSNYWMNWVRQAPGKGLEWVGEIRLKSNNYATHYAEPVKGRFTISRDDSKSSVYLQMNSLKTEDTAVYYCTRYYGNYGGYFDVWGAGTLVTVSS

SEQ ID NO: 618 - protein, 122 aa, Synthetic construct
EVQLVESGGGLVKPGGSLRLSCAASGFTFSNYWMNWVRQAPGKGLEWVGEIRLKSNNYATHYAEPVKGRFTISRDDSKSTLYLQMNSLKTEDTAVYYCTRYYGNYGGYFDVWGAGTLVTVSS

SEQ ID NO: 619 - protein, 122 aa, Synthetic construct
EVQLVESGGGLVKPGGSLRLSCAASGFTFSNYWMNWVRQAPGKGLEWVGEIRLKSNNYATHYAEPVKGRFTISRDDSKSTAYLQMNSLKTEDTAVYYCTRYYGNYGGYFDVWGAGTLVTVSS

SEQ ID NO: 620 - protein, 122 aa, Synthetic construct
EVQLVESGGGLVKPGGSLRLSCAASGFTFSNYWMNWVRQAPGKGLEWVGEIRLKSNNYATHYAEPVKGRFTISRDDSKSTVYLQMNNLKTEDTAVYYCTRYYGNYGGYFDVWGAGTLVTVSS

SEQ ID NO: 621 - protein, 122 aa, Synthetic construct
EVQLVESGGGLVKPGGSLRLSCAASGFTFSNYWMNWVRQAPGKGLEWVGEIRLKSNNYATHYAEPVKGRFTISRDDSKSTVYLQMNSLKTEDTAIYYCTRYYGNYGGYFDVWGAGTLVTVSS

SEQ ID NO: 622 - protein, 122 aa, Synthetic construct
EVQLVESGGGLVKPGGSLRLSCAASGFTFSNYWMNWVRQAPGKGLEWVGEIRLKSNNYATHYAEPVKGRFTISRDDSKSTVYLQMNSLKTEDTAVYYCARYYGNYGGYFDVWGAGTLVTVSS

SEQ ID NO: 623 - protein, 122 aa, Synthetic construct
EVQLVESGGGLVKPGGSLRLSCAASGFTFSNYWMNWVRQAPGKGLEWVGEIRLKSNNYATHYAEPVKGRFTISRDDSKSTVYLQMNSLKTEDTAVYYCVRYYGNYGGYFDVWGAGTLVTVSS

SEQ ID NO: 624 - protein, 122 aa, Synthetic construct
EVQLVESGGGLVKPGGSLRLSCAASGFTFSNYWMNWVRQAPGKGLEWVGEIRLKSNNYATHYAEPVKGRFTISRDDSKSTVYLQMNSLKTEDTAVYYCTRFYGNYGGYFDVWGAGTLVTVSS

SEQ ID NO: 625 - protein, 122 aa, Synthetic construct
EVQLVESGGGLVKPGGSLRLSCAASGFTFSNYWMNWVRQAPGKGLEWVGEIRLKSNNYATHYAEPVKGRFTISRDDSKSTVYLQMNSLKTEDTAVYYCTRHYGNYGGYFDVWGAGTLVTVSS

SEQ ID NO: 626 - protein, 122 aa, Synthetic construct
EVQLVESGGGLVKPGGSLRLSCAASGFTFSNYWMNWVRQAPGKGLEWVGEIRLKSNNYATHYAEPVKGRFTISRDDSKSTVYLQMNSLKTEDTAVYYCTRLYGNYGGYFDVWGAGTLVTVSS

SEQ ID NO: 627 - protein, 122 aa, Synthetic construct
EVQLVESGGGLVKPGGSLRLSCAASGFTFSNYWMNWVRQAPGKGLEWVGEIRLKSNNYATHYAEPVKGRFTISRDDSKSTVYLQMNSLKTEDTAVYYCTRWYGNYGGYFDVWGAGTLVTVSS

SEQ ID NO: 628 - protein, 122 aa, Synthetic construct
EVQLVESGGGLVKPGGSLRLSCAASGFTFSNYWMNWVRQAPGKGLEWVGEIRLKSNNYATHYAEPVKGRFTISRDDSKSTVYLQMNSLKTEDTAVYYCTRVYGNYGGYFDVWGAGTLVTVSS

SEQ ID NO: 629 - protein, 122 aa, Synthetic construct
EVQLVESGGGLVKPGGSLRLSCAASGFTFSNYWMNWVRQAPGKGLEWVGEIRLKSNNYATHYAEPVKGRFTISRDDSKSTVYLQMNSLKTEDTAVYYCTRAYGNYGGYFDVWGAGTLVTVSS

SEQ ID NO: 630 - protein, 122 aa, Synthetic construct
EVQLVESGGGLVKPGGSLRLSCAASGFTFSNYWMNWVRQAPGKGLEWVGEIRLKSNNYATHYAEPVKGRFTISRDDSKSTVYLQMNSLKTEDTAVYYCTRQYGNYGGYFDVWGAGTLVTVSS

SEQ ID NO: 631 - protein, 122 aa, Synthetic construct
EVQLVESGGGLVKPGGSLRLSCAASGFTFSNYWMNWVRQAPGKGLEWVGEIRLKSNNYATHYAEPVKGRFTISRDDSKSTVYLQMNSLKTEDTAVYYCTRDYGNYGGYFDVWGAGTLVTVSS

SEQ ID NO: 632 - protein, 122 aa, Synthetic construct
EVQLVESGGGLVKPGGSLRLSCAASGFTFSNYWMNWVRQAPGKGLEWVGEIRLKSNNYATHYAEPVKGRFTISRDDSKSTVYLQMNSLKTEDTAVYYCTRKYGNYGGYFDVWGAGTLVTVSS

SEQ ID NO: 633 - protein, 122 aa, Synthetic construct
EVQLVESGGGLVKPGGSLRLSCAASGFTFSNYWMNWVRQAPGKGLEWVGEIRLKSNNYATHYAEPVKGRFTISRDDSKSTVYLQMNSLKTEDTAVYYCTRYFGNYGGYFDVWGAGTLVTVSS

SEQ ID NO: 634 - protein, 122 aa, Synthetic construct
EVQLVESGGGLVKPGGSLRLSCAASGFTFSNYWMNWVRQAPGKGLEWVGEIRLKSNNYATHYAEPVKGRFTISRDDSKSTVYLQMNSLKTEDTAVYYCTRYHGNYGGYFDVWGAGTLVTVSS

SEQ ID NO: 635 - protein, 122 aa, Synthetic construct
EVQLVESGGGLVKPGGSLRLSCAASGFTFSNYWMNWVRQAPGKGLEWVGEIRLKSNNYATHYAEPVKGRFTISRDDSKSTVYLQMNSLKTEDTAVYYCTRYLGNYGGYFDVWGAGTLVTVSS

SEQ ID NO: 636 - protein, 122 aa, Synthetic construct
EVQLVESGGGLVKPGGSLRLSCAASGFTFSNYWMNWVRQAPGKGLEWVGEIRLKSNNYATHYAEPVKGRFTISRDDSKSTVYLQMNSLKTEDTAVYYCTRYWGNYGGYFDVWGAGTLVTVSS

SEQ ID NO: 637 - protein, 122 aa, Synthetic construct
EVQLVESGGGLVKPGGSLRLSCAASGFTFSNYWMNWVRQAPGKGLEWVGEIRLKSNNYATHYAEPVKGRFTISRDDSKSTVYLQMNSLKTEDTAVYYCTRYVGNYGGYFDVWGAGTLVTVSS

SEQ ID NO: 638 - protein, 122 aa, Synthetic construct
EVQLVESGGGLVKPGGSLRLSCAASGFTFSNYWMNWVRQAPGKGLEWVGEIRLKSNNYATHYAEPVKGRFTISRDDSKSTVYLQMNSLKTEDTAVYYCTRYAGNYGGYFDVWGAGTLVTVSS

SEQ ID NO: 639 - protein, 122 aa, Synthetic construct
EVQLVESGGGLVKPGGSLRLSCAASGFTFSNYWMNWVRQAPGKGLEWVGEIRLKSNNYATHYAEPVKGRFTISRDDSKSTVYLQMNSLKTEDTAVYYCTRYQGNYGGYFDVWGAGTLVTVSS

SEQ ID NO: 640 - protein, 122 aa, Synthetic construct
EVQLVESGGGLVKPGGSLRLSCAASGFTFSNYWMNWVRQAPGKGLEWVGEIRLKSNNYATHYAEPVKGRFTISRDDSKSTVYLQMNSLKTEDTAVYYCTRYDGNYGGYFDVWGAGTLVTVSS

SEQ ID NO: 641 - protein, 122 aa, Synthetic construct
EVQLVESGGGLVKPGGSLRLSCAASGFTFSNYWMNWVRQAPGKGLEWVGEIRLKSNNYATHYAEPVKGRFTISRDDSKSTVYLQMNSLKTEDTAVYYCTRYKGNYGGYFDVWGAGTLVTVSS

SEQ ID NO: 642 - protein, 122 aa, Synthetic construct
EVQLVESGGGLVKPGGSLRLSCAASGFTFSNYWMNWVRQAPGKGLEWVGEIRLKSNNYATHYAEPVKGRFTISRDDSKSTVYLQMNSLKTEDTAVYYCTRYYHNYGGYFDVWGAGTLVTVSS

SEQ ID NO: 643 - protein, 122 aa, Synthetic construct
EVQLVESGGGLVKPGGSLRLSCAASGFTFSNYWMNWVRQAPGKGLEWVGEIRLKSNNYATHYAEPVKGRFTISRDDSKSTVYLQMNSLKTEDTAVYYCTRYYFNYGGYFDVWGAGTLVTVSS

SEQ ID NO: 644 - protein, 122 aa, Synthetic construct
EVQLVESGGGLVKPGGSLRLSCAASGFTFSNYWMNWVRQAPGKGLEWVGEIRLKSNNYATHYAEPVKGRFTISRDDSKSTVYLQMNSLKTEDTAVYYCTRYYGSYGGYFDVWGAGTLVTVSS

SEQ ID NO: 645 - protein, 122 aa, Synthetic construct
EVQLVESGGGLVKPGGSLRLSCAASGFTFSNYWMNWVRQAPGKGLEWVGEIRLKSNNYATHYAEPVKGRFTISRDDSKSTVYLQMNSLKTEDTAVYYCTRYYGGYGGYFDVWGAGTLVTVSS

SEQ ID NO: 646 - protein, 122 aa, Synthetic construct
EVQLVESGGGLVKPGGSLRLSCAASGFTFSNYWMNWVRQAPGKGLEWVGEIRLKSNNYATHYAEPVKGRFTISRDDSKSTVYLQMNSLKTEDTAVYYCTRYYGFYGGYFDVWGAGTLVTVSS

SEQ ID NO: 647 - protein, 122 aa, Synthetic construct
EVQLVESGGGLVKPGGSLRLSCAASGFTFSNYWMNWVRQAPGKGLEWVGEIRLKSNNYATHYAEPVKGRFTISRDDSKSTVYLQMNSLKTEDTAVYYCTRYYGNFGGYFDVWGAGTLVTVSS

SEQ ID NO: 648 - protein, 122 aa, Synthetic construct
EVQLVESGGGLVKPGGSLRLSCAASGFTFSNYWMNWVRQAPGKGLEWVGEIRLKSNNYATHYAEPVKGRFTISRDDSKSTVYLQMNSLKTEDTAVYYCTRYYGNHGGYFDVWGAGTLVTVSS

SEQ ID NO: 649 - protein, 122 aa, Synthetic construct
EVQLVESGGGLVKPGGSLRLSCAASGFTFSNYWMNWVRQAPGKGLEWVGEIRLKSNNYATHYAEPVKGRFTISRDDSKSTVYLQMNSLKTEDTAVYYCTRYYGNLGGYFDVWGAGTLVTVSS

SEQ ID NO: 650 - protein, 122 aa, Synthetic construct
EVQLVESGGGLVKPGGSLRLSCAASGFTFSNYWMNWVRQAPGKGLEWVGEIRLKSNNYATHYAEPVKGRFTISRDDSKSTVYLQMNSLKTEDTAVYYCTRYYGNWGGYFDVWGAGTLVTVSS

SEQ ID NO: 651 - protein, 122 aa, Synthetic construct
EVQLVESGGGLVKPGGSLRLSCAASGFTFSNYWMNWVRQAPGKGLEWVGEIRLKSNNYATHYAEPVKGRFTISRDDSKSTVYLQMNSLKTEDTAVYYCTRYYGNVGGYFDVWGAGTLVTVSS

SEQ ID NO: 652 - protein, 122 aa, Synthetic construct
EVQLVESGGGLVKPGGSLRLSCAASGFTFSNYWMNWVRQAPGKGLEWVGEIRLKSNNYATHYAEPVKGRFTISRDDSKSTVYLQMNSLKTEDTAVYYCTRYYGNAGGYFDVWGAGTLVTVSS

SEQ ID NO: 653 - protein, 122 aa, Synthetic construct
EVQLVESGGGLVKPGGSLRLSCAASGFTFSNYWMNWVRQAPGKGLEWVGEIRLKSNNYATHYAEPVKGRFTISRDDSKSTVYLQMNSLKTEDTAVYYCTRYYGNQGGYFDVWGAGTLVTVSS

SEQ ID NO: 654 - protein, 122 aa, Synthetic construct
EVQLVESGGGLVKPGGSLRLSCAASGFTFSNYWMNWVRQAPGKGLEWVGEIRLKSNNYATHYAEPVKGRFTISRDDSKSTVYLQMNSLKTEDTAVYYCTRYYGNEGGYFDVWGAGTLVTVSS

SEQ ID NO: 655 - protein, 122 aa, Synthetic construct
EVQLVESGGGLVKPGGSLRLSCAASGFTFSNYWMNWVRQAPGKGLEWVGEIRLKSNNYATHYAEPVKGRFTISRDDSKSTVYLQMNSLKTEDTAVYYCTRYYGNKGGYFDVWGAGTLVTVSS

SEQ ID NO: 656 - protein, 122 aa, Synthetic construct
EVQLVESGGGLVKPGGSLRLSCAASGFTFSNYWMNWVRQAPGKGLEWVGEIRLKSNNYATHYAEPVKGRFTISRDDSKSTVYLQMNSLKTEDTAVYYCTRYYGNYAGYFDVWGAGTLVTVSS

SEQ ID NO: 657 - protein, 122 aa, Synthetic construct
EVQLVESGGGLVKPGGSLRLSCAASGFTFSNYWMNWVRQAPGKGLEWVGEIRLKSNNYATHYAEPVKGRFTISRDDSKSTVYLQMNSLKTEDTAVYYCTRYYGNYQGYFDVWGAGTLVTVSS

SEQ ID NO: 658 - protein, 122 aa, Synthetic construct
EVQLVESGGGLVKPGGSLRLSCAASGFTFSNYWMNWVRQAPGKGLEWVGEIRLKSNNYATHYAEPVKGRFTISRDDSKSTVYLQMNSLKTEDTAVYYCTRYYGNYHGYFDVWGAGTLVTVSS

SEQ ID NO: 659 - protein, 122 aa, Synthetic construct
EVQLVESGGGLVKPGGSLRLSCAASGFTFSNYWMNWVRQAPGKGLEWVGEIRLKSNNYATHYAEPVKGRFTISRDDSKSTVYLQMNSLKTEDTAVYYCTRYYGNYDGYFDVWGAGTLVTVSS

SEQ ID NO: 660 - protein, 122 aa, Synthetic construct
EVQLVESGGGLVKPGGSLRLSCAASGFTFSNYWMNWVRQAPGKGLEWVGEIRLKSNNYATHYAEPVKGRFTISRDDSKSTVYLQMNSLKTEDTAVYYCTRYYGNYKGYFDVWGAGTLVTVSS

SEQ ID NO: 661 - protein, 122 aa, Synthetic construct
EVQLVESGGGLVKPGGSLRLSCAASGFTFSNYWMNWVRQAPGKGLEWVGEIRLKSNNYATHYAEPVKGRFTISRDDSKSTVYLQMNSLKTEDTAVYYCTRYYGNYLGYFDVWGAGTLVTVSS

SEQ ID NO: 662 - protein, 122 aa, Synthetic construct
EVQLVESGGGLVKPGGSLRLSCAASGFTFSNYWMNWVRQAPGKGLEWVGEIRLKSNNYATHYAEPVKGRFTISRDDSKSTVYLQMNSLKTEDTAVYYCTRYYGNYFGYFDVWGAGTLVTVSS

SEQ ID NO: 663 - protein, 122 aa, Synthetic construct
EVQLVESGGGLVKPGGSLRLSCAASGFTFSNYWMNWVRQAPGKGLEWVGEIRLKSNNYATHYAEPVKGRFTISRDDSKSTVYLQMNSLKTEDTAVYYCTRYYGNYGAYFDVWGAGTLVTVSS

SEQ ID NO: 664 - protein, 122 aa, Synthetic construct
EVQLVESGGGLVKPGGSLRLSCAASGFTFSNYWMNWVRQAPGKGLEWVGEIRLKSNNYATHYAEPVKGRFTISRDDSKSTVYLQMNSLKTEDTAVYYCTRYYGNYGSYFDVWGAGTLVTVSS

SEQ ID NO: 665 - protein, 122 aa, Synthetic construct
EVQLVESGGGLVKPGGSLRLSCAASGFTFSNYWMNWVRQAPGKGLEWVGEIRLKSNNYATHYAEPVKGRFTISRDDSKSTVYLQMNSLKTEDTAVYYCTRYYGNYGTYFDVWGAGTLVTVSS

SEQ ID NO: 666 - protein, 122 aa, Synthetic construct
EVQLVESGGGLVKPGGSLRLSCAASGFTFSNYWMNWVRQAPGKGLEWVGEIRLKSNNYATHYAEPVKGRFTISRDDSKSTVYLQMNSLKTEDTAVYYCTRYYGNYGNYFDVWGAGTLVTVSS

SEQ ID NO: 667 - protein, 122 aa, Synthetic construct
EVQLVESGGGLVKPGGSLRLSCAASGFTFSNYWMNWVRQAPGKGLEWVGEIRLKSNNYATHYAEPVKGRFTISRDDSKSTVYLQMNSLKTEDTAVYYCTRYYGNYGHYFDVWGAGTLVTVSS

SEQ ID NO: 668 - protein, 122 aa, Synthetic construct
EVQLVESGGGLVKPGGSLRLSCAASGFTFSNYWMNWVRQAPGKGLEWVGEIRLKSNNYATHYAEPVKGRFTISRDDSKSTVYLQMNSLKTEDTAVYYCTRYYGNYGDYFDVWGAGTLVTVSS

SEQ ID NO: 669 - protein, 122 aa, Synthetic construct
EVQLVESGGGLVKPGGSLRLSCAASGFTFSNYWMNWVRQAPGKGLEWVGEIRLKSNNYATHYAEPVKGRFTISRDDSKSTVYLQMNSLKTEDTAVYYCTRYYGNYGKYFDVWGAGTLVTVSS

SEQ ID NO: 670 - protein, 122 aa, Synthetic construct
EVQLVESGGGLVKPGGSLRLSCAASGFTFSNYWMNWVRQAPGKGLEWVGEIRLKSNNYATHYAEPVKGRFTISRDDSKSTVYLQMNSLKTEDTAVYYCTRYYGNYGLYFDVWGAGTLVTVSS

SEQ ID NO: 671 - protein, 122 aa, Synthetic construct
EVQLVESGGGLVKPGGSLRLSCAASGFTFSNYWMNWVRQAPGKGLEWVGEIRLKSNNYATHYAEPVKGRFTISRDDSKSTVYLQMNSLKTEDTAVYYCTRYYGNYGFYFDVWGAGTLVTVSS

SEQ ID NO: 672 - protein, 122 aa, Synthetic construct
EVQLVESGGGLVKPGGSLRLSCAASGFTFSNYWMNWVRQAPGKGLEWVGEIRLKSNNYATHYAEPVKGRFTISRDDSKSTVYLQMNSLKTEDTAVYYCTRYYGNYGGFFDVWGAGTLVTVSS

SEQ ID NO: 673 - protein, 122 aa, Synthetic construct
EVQLVESGGGLVKPGGSLRLSCAASGFTFSNYWMNWVRQAPGKGLEWVGEIRLKSNNYATHYAEPVKGRFTISRDDSKSTVYLQMNSLKTEDTAVYYCTRYYGNYGGHFDVWGAGTLVTVSS

SEQ ID NO: 674 - protein, 122 aa, Synthetic construct
EVQLVESGGGLVKPGGSLRLSCAASGFTFSNYWMNWVRQAPGKGLEWVGEIRLKSNNYATHYAEPVKGRFTISRDDSKSTVYLQMNSLKTEDTAVYYCTRYYGNYGGLFDVWGAGTLVTVSS

SEQ ID NO: 675 - protein, 122 aa, Synthetic construct
EVQLVESGGGLVKPGGSLRLSCAASGFTFSNYWMNWVRQAPGKGLEWVGEIRLKSNNYATHYAEPVKGRFTISRDDSKSTVYLQMNSLKTEDTAVYYCTRYYGNYGGWFDVWGAGTLVTVSS

SEQ ID NO: 676 - protein, 122 aa, Synthetic construct
EVQLVESGGGLVKPGGSLRLSCAASGFTFSNYWMNWVRQAPGKGLEWVGEIRLKSNNYATHYAEPVKGRFTISRDDSKSTVYLQMNSLKTEDTAVYYCTRYYGNYGGVFDVWGAGTLVTVSS

SEQ ID NO: 677 - protein, 122 aa, Synthetic construct
EVQLVESGGGLVKPGGSLRLSCAASGFTFSNYWMNWVRQAPGKGLEWVGEIRLKSNNYATHYAEPVKGRFTISRDDSKSTVYLQMNSLKTEDTAVYYCTRYYGNYGGAFDVWGAGTLVTVSS

SEQ ID NO: 678 - protein, 122 aa, Synthetic construct
EVQLVESGGGLVKPGGSLRLSCAASGFTFSNYWMNWVRQAPGKGLEWVGEIRLKSNNYATHYAEPVKGRFTISRDDSKSTVYLQMNSLKTEDTAVYYCTRYYGNYGGQFDVWGAGTLVTVSS

SEQ ID NO: 679 - protein, 122 aa, Synthetic construct
EVQLVESGGGLVKPGGSLRLSCAASGFTFSNYWMNWVRQAPGKGLEWVGEIRLKSNNYATHYAEPVKGRFTISRDDSKSTVYLQMNSLKTEDTAVYYCTRYYGNYGGDFDVWGAGTLVTVSS

SEQ ID NO: 680 - protein, 122 aa, Synthetic construct
EVQLVESGGGLVKPGGSLRLSCAASGFTFSNYWMNWVRQAPGKGLEWVGEIRLKSNNYATHYAEPVKGRFTISRDDSKSTVYLQMNSLKTEDTAVYYCTRYYGNYGGKFDVWGAGTLVTVSS

SEQ ID NO: 681 - protein, 122 aa, Synthetic construct
EVQLVESGGGLVKPGGSLRLSCAASGFTFSNYWMNWVRQAPGKGLEWVGEIRLKSNNYATHYAEPVKGRFTISRDDSKSTVYLQMNSLKTEDTAVYYCTRYYGNYGGYFDYWGAGTLVTVSS

SEQ ID NO: 682 - protein, 122 aa, Synthetic construct
EVQLVESGGGLVKPGGSLRLSCAASGFTFSNYWMNWVRQAPGKGLEWVGEIRLKSNNYATHYAEPVKGRFTISRDDSKSTVYLQMNSLKTEDTAVYYCTRYYGNYGGYFDVWGQGTLVTVSS

SEQ ID NO: 683 - protein, 122 aa, Synthetic construct
EVQLVESGGGLVQPGGSLKLSCAASGFTFSNYWMNWVRQASGKGLEWVGEIRLKSNNYATHYAESVKGRFTISRDDSKSTVYLQMNSLKTEDTAVYYCTRYYGNYGGYFDVWGAGTLVTVSS

SEQ ID NO: 684 - protein, 132 aa, Synthetic construct
EVQLVESGGGLVKPGGSLRLSCVASGFLRLSCVASGFTFSNYWMNWVRQAPGKGLEWVAEIRLYSNNYATHYAESVKGRFTISRDDSKSTLYLQMNNLKTEDTGVYYCTRYYGNYGGYFDVWGRGTLVTVSS

SEQ ID NO: 685 - protein, 125 aa, Synthetic construct
EVQLEVQLEVQLVESGGGLVQPGGSLTLSCAASSSSVSLLSLAWYRQAPGKKRELVAGISDDGSIVYMDSVKGRFTISRDNAKNSVYLQMNSLRAEDTAVYYCYAYSWITRSPYWGQGTLVTVSS

SEQ ID NO: 686 - protein, 133 aa, Synthetic construct
EVQLEVQLEVQLVESGGGLVQPGGSLKLSCAASGFTFNKYAINWVRQAPGKGLEWVARIRSKYNNYATYYADQVKDRFTISRDDSKNTAYLQMNNLKTEDTAVYYCVRHANFGNSYISYWAYWGQGTLVTVSS

SEQ ID NO: 687 - protein, 120 aa, Synthetic construct
QVQLVETGGGLVQPKGSLKLSCAASGFTFNTNAMNWVRQAPGKGLEWVARIRSKSNNYATYYADSVKDRFTISRDDSQSLLYLQMNNLKTEDTAMYYCVYGRSYGGLSYWGQGTLVTVSA

SEQ ID NO: 688 - protein, 120 aa, Synthetic construct
EVKLVESGGGLVQPKGSLKLSCAASGFTFNTNAMNWVRQAPGKGLEWVARIRSKSDNYATYYADSVKDRFTISRDDSPSMLYLQMNNLKTEDTAMYYCVYGRSYGGLGYWGQGTLVTVSA

SEQ ID NO: 689 - protein, 122 aa, Synthetic construct
EVKLVESGGGLVQPKGSLKLSCAASGFTFNTYAMNWVRQAPGKGLEWVARIRSKSNNYATYYADSVKDRFTISRDDSQSMLYLQMNNLKTEDTAMYYCVRQVTTAVGGFAYWGQGTLVTVSE

SEQ ID NO: 690 - protein, 126 aa, Synthetic construct
EVKLVESGGGLVQPKGSLKLSCAASGYTFNTYAMNWVRQAPGKGLEWVARIRSKSNNYTTYYADSVKDRFTISRDDSQSMLYLQINNLKTEDTAMYYCVGQILYYYVGSPAWFAYWGQGTLVTVSA

SEQ ID NO: 691 - protein, 117 aa, Synthetic construct
EVQLVESGGGLVQPKGSLKLSCAASGFTFNTYAMNWVRQAPGKGLEWVARIRSKSNNYATYYADSVKDRFTISRDDSQSMLYLQMNNLKKEDTAMYYCVGYGSGGNYWGQGTSVTVS

SEQ ID NO: 692 - protein, 118 aa, Synthetic construct
EVQLVESGGGLVQPKGSLKLSCAASGFTFNTYAMNWVRQAPGKGLEWVARIRSKSNNYATYYADSVKDRFTISRDDSQSMLYLQMNNLKKEDTAMYYCVGYGSGGNYWGQGTSVTVSS

SEQ ID NO: 693 - protein, 122 aa, Synthetic construct
EVRLVESGGGLVQPKGSLKLSCAASGFSFNTYAMNWVRQAPGKGLEWVARIRSKRNNFATYYADSVKDRFTISRDDSKSMLYLQMNNLKTEDTAMYYCVRWGYDDPYAMDYWGQGTSVTVSS

SEQ ID NO: 694 - protein, 122 aa, Synthetic construct
KLVESGGGLVQPTGSLKLSCVTSGFSFNIYAMNWVRQAPGKGLEWVARIRSKSNNYATYYADSVKDRFTISRDDSESMLYLQMNNLKTEDTAMYYCMRHPNYSGFNYPFASWGPGTLVTVSA

SEQ ID NO: 695 - protein, 125 aa, Synthetic construct
EVQLLESGGGLVQPGGSLRLSCAASGFTFNTYAMNWVRQAPGKGLEWVARIRSKYNNYATYYADSVKGRFTISRDNSKNTLYLQMNSLRAEDTAVYYCAKHGNFGNSYVSWFAYWGQGTLVTVSS

SEQ ID NO: 696 - protein, 125 aa, Synthetic construct
EVQLLESGGGLVQPGGSLRLSCAASGFTFNTYAMNWVRQAPGKGLEWVARIRSKYNNYATYYADSVKGRFTISRDNSKNTLYLQMNSLRAEDTAVYYCVKHGNFGNSYVSWFAYWGQGTLVTVSS

SEQ ID NO: 697 - protein, 125 aa, Synthetic construct
EVQLVESGGGLVQPGGSLKLSCAASGFTFNTYAMNWVRQASGKGLEWVGRIRSKYNGYATYYAASVKGRFTISRDDSKNTAYLQMNSLKTEDTAVYYCTRHGNFGNSYVSWFAYWGQGTLVTVSS

SEQ ID NO: 698 - protein, 133 aa, Synthetic construct
EVQLEVQLEVQLVESGGGLVQPGGSLKLSCAASGFTFNNYAMNWVRQAPGKGLEWVARIRSGYNNYATYYADSVKDRFTISRDDSKNTAYLQMNNLKTEDTAVYYCVRHGNFGNSYISYWAYWGQGTLVTVSS

SEQ ID NO: 699 - protein, 133 aa, Synthetic construct
EVQLEVQLEVQLVESGGGLVQPGGSLKLSCAASGFEFNKYAMNWVRQAPGKGLEWVARIRSKYNNYETYYADSVKDRFTISRDDSKNTAYLQMNNLKTEDTAVYYCVRHGNFGNSLISYWAYWGQGTLVTVSS

SEQ ID NO: 700 - protein, 120 aa, Synthetic construct
EVQLVESGGGLMQPKGSLKLSCAASGFTFKTYALNWVRQAPGTGLEWVARIRSKSNNYTTYYADSVKDRFTISRDDSQNMLYLQMNNLKTEDTAMYYCVRPQSGTSFAYWGQGTLVTVSA

SEQ ID NO: 701 - protein, 125 aa, Synthetic construct
EVQLVESGGGLVQPGGSLRLSCAASGFTFNTYAMNWVRQAPGKGLEWVARIRSKYNNYATYYADSVKDRFTISRDDSKNTLYLQMNSLRAEDTAVYYCVRHGNFGNSYVSWFAYWGQGTMVTVSS

SEQ ID NO: 702 - protein, 129 aa, Synthetic construct
EVQLEVQLVESGGGLVQPGGSLRLSCAASGFTFNTYAMNWVRQAPGKGLEWVARIRSKYNNYATYYADSVKDRFTISRDDSKNTLYLQMNSLRAEDTAVYYCVRHGNFGNSYVSWFAYWGQGTMVTVSS

SEQ ID NO: 703 - protein, 125 aa, Synthetic construct
EVQLVESGGGLVQPGGSLRLSCAASGFTFSTYAMNWVRQAPGKGLEWVSRIRSKYNNYATYYADSVKDRFTISRDDSKNTLYLQMNSLRAEDTAVYYCARHGNFGNSYVSWFAYWGQGTMVTVSS

SEQ ID NO: 704 - protein, 125 aa, Synthetic construct
EVQLVESGGGLVQPGGSLRLSCAASGFTFNTYAMNWVRQAPGKGLEWVSRIRSKYNNYATYYADSVKDRFTISRDDSKNTLYLQMNSLRAEDTAVYYCARHGNFGNSYVSWFAYWGQGTMVTVSS

SEQ ID NO: 705 - protein, 125 aa, Synthetic construct
EVQLVESGGGLVQPGGSLRLSCAASGFTFSTYAMNWVRQAPGKGLEWVARIRSKYNNYATYYADSVKDRFTISRDDSKNTLYLQMNSLRAEDTAVYYCARHGNFGNSYVSWFAYWGQGTMVTVSS

SEQ ID NO: 706 - protein, 125 aa, Synthetic construct
EVQLVESGGGLVQPGGSLRLSCAASGFTFSTYAMNWVRQAPGKGLEWVARIRSKYNNYATYYADSVKDRFTISRDDSKNTLYLQMNSLRAEDTAVYYCVRHGNFGNSYVSWFAYWGQGTMVTVSS

SEQ ID NO: 707 - protein, 125 aa, Synthetic construct
EVQLVESGGGLVQPGGSLKLSCAASGFTFSTYAMNWVRQASGKGLEWVGRIRSKYNNYATYYADSVKDRFTISRDDSKNTAYLQMNSLKTEDTAVYYCTRHGNFGNSYVSWFAYWGQGTLVTVSS

SEQ ID NO: 708 - protein, 117 aa, Synthetic construct
EVQLVESGGGLVKPGGSLRLSCAASGFTFSTNAMNWVRQAPGKGLERVARIRSKSNNYATYYADSVKDRFTISRDDSKNTLYLQMNSLKTEDTAVYYCVTMIPFAYWGQGTLVTVSS

SEQ ID NO: 709 - protein, 124 aa, Synthetic construct
EVQLEVQLVESGGGLVQPGGSLRLSCTASGFSLTDYYYMTWVRQAPGKGLEWVGFIDPDDDPYYATWAKGRFTISRDNSKNTLYLQMNSLRAEDTAVYYCAGGDHNSGWGLDIWGQGTLVTVSS

SEQ ID NO: 710 - protein, 127 aa, Synthetic construct
EVQLEVQLVESGGGLVQPGGSLRLSCAASGYDFTHYGMNWVRQAPGKGLEWVGWINTYTGEPTYAADFKRRFTFSLDTSKSTAYLQMNSLRAEDTAVYYCAKYPYYYGTSHWYFDVWGQGTLVTVSS

SEQ ID NO: 711 - protein, 122 aa, Synthetic construct
LVQLVESGGGLVKPGGSLRLSCAASGFTFNANAMNWIRQAPGKGLEWVSRIRTKSNNYATYYAGSVKDRFTISRDNAKNSLYLQMNSLRAEDTAVHYCVRDYYGSSAWITYWGQGTLVTVSS

SEQ ID NO: 712 - protein, 121 aa, Synthetic construct
EVQLVESGGGLVQPKGSLKLSCAASGYTFNTYAVNWVRQAPGKGLEWVARIRSKSYNYVTYYADSVKDRFTISRDDSQSMLYLQMNNLKTEDTAMYYCVKGNGNYVSFAYWGQGTLVTVSA

SEQ ID NO: 713 - protein, 116 aa, Synthetic construct
EVQLVETGGGLVQPKGSLKLSCAASGFNFNTNAMNWVRQAPGKGLEWVALIRSKSNNYATYYADSVKDRFTISRDDEQSMLHLQMNNLKTEDTAIYFCVKGYGSYWGQGTTLTVSS

SEQ ID NO: 714 - protein, 123 aa, Synthetic construct
EVQLEVQLEVQLVESGGGLVQPGNSLRLSCAASGFTFSSFGMSWVRQAPGKGLEWVSSISGSGSDTLYADSVKGRFTISRDNAKTTLYLQMNSLRPEDTAVYYCTIGGSLSRSSQGTLVTVSS

SEQ ID NO: 715 - protein, 135 aa, Synthetic construct
EVQLEVQLEVQLVESGGGLVQAGGSLRLSCAASGRTFSSYAMGWFRQAPGKEREFVVAINWSSGSTYYADSVKGRFTISRDNAKNTMYLQMNSLKPEDTAVYYCAAGYQINSGNYNFKDYEYDYWGQGTQVTVSS

SEQ ID NO: 716 - protein, 119 aa, Synthetic construct
EVQLEVQLVESGGGLVQPGNSLRLSCAASGFTFSSFGMSWVRQAPGKGLEWVSSISGSGSDTLYADSVKGRFTISRDNAKTTLYLQMNSLRPEDTAVYYCTIGGSLSRSSQGTLVTVSS

SEQ ID NO: 717 - protein, 119 aa, Synthetic construct
EVQLEVQLEVQLVESGGGLVQPGGSLTLSCAASRFMISEYSMHWVRQAPGKGLEWVSTINPAGTTDYAESVKGRFTISRDNAKNTLYLQMNSLKPEDTAVYYCDGYGYRGQGTQVTVSS

SEQ ID NO: 718 - protein, 129 aa, Synthetic construct
EVQLEVQLLESGGGLVQPGGSLKLSCAASGFTFNKYAMNWVRQAPGKGLEWVARIRSKYNNYATYYADSVKDRFTISRDDSKNTAYLQMNNLKTEDTAVYYCVRHGNFGNSYISYWAYWGQGTLVTVSS

SEQ ID NO: 719 - protein, 129 aa, Synthetic construct
EVQLEVQLLESGGGLVQPGGSLKLSCAASGFTFNRYAMNWVRQAPGKGLEWVARIRSKYNNYATYYADSVKGRFTISRDDSKNTAYLQMNNLKTEDTAVYYCVRHGNFGNSYLSYFAYWGQGTLVTVSS

SEQ ID NO: 720 - protein, 129 aa, Synthetic construct
EVQLEVQLVESGGGLVQPGGSLKLSCAASGFTFNSYAMNWVRQAPGKGLEWVARIRSKYNNYATYYADSVKGRFTISRDDSKNTAYLQMNNLKTEDTAVYYCVRHGNFGNSYVSWWAYWGQGTLVTVSS

SEQ ID NO: 721 - protein, 129 aa, Synthetic construct
EVQLEVQLVESGGGLVQPGGSLRLSCAASGFTFSTYAMNWVRQAPGKGLEWVGRIRSKANNYATYYADSVKGRFTISRDDSKNTLYLQMNSLRAEDTAVYYCVRHGNFGDSYVSWFAYWGQGTLVTVSS

SEQ ID NO: 722 - protein, 129 aa, Synthetic construct
EVQLEVQLVESGGGLVQPGGSLRLSCAASGFTFSTYAMNWVRQAPGKGLEWVGRIRSKYNNYATYYADSVKGRFTISRDDSKNTLYLQMNSLRAEDTAVYYCVRHGNFGDEYVSWFAYWGQGTLVTVSS

SEQ ID NO: 723 - protein, 129 aa, Synthetic construct
EVQLEVQLVESGGGLVQPGGSLRLSCAASGFTFSTYAMNWVRQAPGKGLEWVGRIRSKYNNYATYYADSVKGRFTISRDDSKNTLYLQMNSLRAEDTAVYYCVRHGNFGDPYVSWFAYWGQGTLVTVSS

SEQ ID NO: 724 - protein, 117 aa, Synthetic construct
EVQLQESGGGLVQPKGSLQLSCAASGFTFNTYAMHWVRQAPGKGLEWVARIRTESSDYATDYADSVKDRFIISRDDSQNMLYLQMNNLKSEDTAIYYCVRSSGFDYWGQGTTLTVSS

SEQ ID NO: 725 - protein, 117 aa, Synthetic construct
EVQLVESGGGLVQPKGSLKLSCAASGLTFNIYAMNWVRQAPGKGLEWVARIRNKSNNYATYYADSVKDRFTISRDDSQSLLYLQMNNLKTEDTAMYYCVGRDWFDYWGQGTLVTVSA

SEQ ID NO: 726 - protein, 128 aa, Synthetic construct
EVQLEVQLVESGGGLVQPGGSLKLSCAASGFTFNKYAMWVRQAPGKGLEWVARIRSKYNNYATYYADSVKDRFTISRDDSKNTAYLQMNNLKTEDTAVYYCVRHGNFGNSYISYWAYWGQGTLVTVSS

SEQ ID NO: 727 - protein, 122 aa, Synthetic construct
EVQLVESGGGLVQPGGSLRLSCAASGFTFSSYTMSWVRQAPGKGLEWVATISRGGGYTSYPDSVKGRFTISRDNSKNTLYLQMNSLRAEDTAVYYCAREDYGSSYVHWFAYWGQGTLVTVSA

SEQ ID NO: 728 - protein, 122 aa, Synthetic construct
EVQLVESGGGLVQPGGSLRLSCAASGFTFSSYTMSWVRQAPGKGLEWVATISRGGGYTSYPDSVKGRFTISRDNSKNTLYLQMNSLRAEDTAMYYCAREDYGSSYVHWFAYWGQGTLVTVSA

SEQ ID NO: 729 - protein, 125 aa, Synthetic construct
EVKLVESGGGLVQPGGSLRLSCAASGFTFNPYAMNWVRQAPGKGLEWVARIRSKYNNYATYYADSVKDRFTISRDDSKSSLYLQMNNLKTEDTAMYYCVRHGNFGNSYVSWFAYWGQGTLVTVSS

SEQ ID NO: 730 - protein, 125 aa, Synthetic construct
EVKLVESGGGLVQPGGSLRLSCAASGFTFNMYAMNWVRQAPGKGLEWVARIRSKYNNYATYYADSVKDRFTISRDDSKSSLYLQMNNLKTEDTAMYYCVRHGNFGNSYVSWFAYWGQGTLVTVSS

SEQ ID NO: 731 - protein, 125 aa, Synthetic construct
EVKLVESGGGLVQPGGSLRLSCAASGFTFNTYAMNWVRQAPGKGLEWVARIRSKYNEYATYYADSVKDRFTISRDDSKSSLYLQMNNLKTEDTAMYYCVRHGNFGNSYVSWFAYWGQGTLVTVSS

SEQ ID NO: 732 - protein, 125 aa, Synthetic construct
EVKLVESGGGLVQPGGSLRLSCAASGFTFNTYAMNWVRQAPGKGLEWVARIRSKYNNYATYYADSVKDRFTISRDDSKSSLYLQMNNLKTEDTAMYYCVRGGNFGNSYVSWFAYWGQGTLVTVSS

SEQ ID NO: 733 - protein, 125 aa, Synthetic construct
EVKLVESGGGLVQPGGSLRLSCAASGFTFNTYAMNWVRQAPGKGLEWVARIRSKYNNYATYYADSVKDRFTISRDDSKSSLYLQMNNLKTEDTAMYYCVRNGNFGNSYVSWFAYWGQGTLVTVSS

SEQ ID NO: 734 - protein, 125 aa, Synthetic construct
EVKLVESGGGLVQPGGSLRLSCAASGFTFNTYAMNWVRQAPGKGLEWVARIRSKYNNYATYYADSVKDRFTISRDDSKSSLYLQMNNLKTEDTAMYYCVRHGNFPNSYVSWFAYWGQGTLVTVSS

SEQ ID NO: 735 - protein, 125 aa, Synthetic construct
EVKLVESGGGLVQPGGSLRLSCAASGFTFNTYAMNWVRQAPGKGLEWVARIRSKYNNYATYYADSVKDRFTISRDDSKSSLYLQMNNLKTEDTAMYYCVRHGNFGNSYVAWFAYWGQGTLVTVSS

SEQ ID NO: 736 - protein, 125 aa, Synthetic construct
EVKLVESGGGLVQPGGSLRLSCAASGFTFNTYAMNWVRQAPGKGLEWVARIRSKYNNYATYYADSVKDRFTISRDDSKSSLYLQMNNLKTEDTAMYYCVRHGNFGNSYVGWFAYWGQGTLVTVSS

SEQ ID NO: 737 - protein, 125 aa, Synthetic construct
EVKLVESGGGLVQPGGSLRLSCAASGFTFNTYAMNWVRQAPGKGLEWVARIRSKYNNYATYYADSVKDRFTISRDDSKSSLYLQMNNLKTEDTAMYYCVRHGNFGNSYVSWFAVWGQGTLVTVSS

SEQ ID NO: 738 - protein, 125 aa, Synthetic construct
EVKLVESGGGLVQPGGSLRLSCAASGFTFNTYAMNWVRQAPGKGLEWVARIRSKYNNYATYYADSVKDRFTISRDDSKSSLYLQMNNLKTEDTAMYYCVRHGNFGNSYVSWFAMWGQGTLVTVSS

SEQ ID NO: 739 - protein, 125 aa, Synthetic construct
EVKLVESGGGLVQPGGSLRLSCAASGFTFNTYAMNWVRQAPGKGLEWVARIRSKYNNYATYYADSVKDRFTISRDDSKSSLYLQMNNLKTEDTAMYYCVRHGNFGNSYVSWFARWGQGTLVTVSS

SEQ ID NO: 740 - protein, 129 aa, Synthetic construct
EVQLEVQLVESGGGLVQPGGSLRLSCAASGFTFSTYAMNWVRQAPGKGLEWVSRIRSKYNNYATYYADSVKDRFTISRDDSKNTLYLQMNSLRAEDTAVYYCARHGNFGNSYVSWFAYWGQGTMVTVSS

SEQ ID NO: 741 - protein, 129 aa, Synthetic construct
EVQLEVQLVESGGGLVQPGGSLRLSCAASGFTFNSYAMNWVRQAPGKGLEWVARIRSKYNNYATYYADSVKGRFTISRDDSKNTAYLQMNSLKTEDTAVYYCVRHGNFGNSYVSWWAYWGQGTLVTVSS

SEQ ID NO: 742 - protein, 124 aa, Synthetic construct
EVQLLESGGGLVQPGGSLRLSCAASGFTFNNYGMNWVRQAPGKGLEWVSAISGTGYSTYYADSVKGRFTISRDNSKNTLYLQMNSLRAEDTAVYYCAKAHYFGSGSYYTLFDYWGQGTLVTVSS

SEQ ID NO: 743 - protein, 127 aa, Synthetic construct
EVQLVESGGGLVQPGGSLRLSCAASGFTFSTYAMHWVRQAPGKGLEWVAVISYDGNYQYYADSVKGRFTISRDNSKNTLYLQMNSLRAEDTAVYYCVTNLDNSRDYFPHYFHDMDVWGQGTLVTVSS

SEQ ID NO: 744 - protein, 120 aa, Synthetic construct
EVQLVESGGGLVQPKGSLKLSCAASGFTFNIYAMHWVRQAPGKGLEWVARIRSKSSNYATYYVDSVKDRFIISRDDSQSMLYLQVNNLKTEDTAMYYCVREGNWDCFDYWGQGTTLTVSS

SEQ ID NO: 745 - protein, 123 aa, Synthetic construct
EVQHVETGGGLVQPKGSLKLSCAASGFTFNTNAMNWVRQAPGKGLEWVARIRSKSNNYATYYADSVKDRFTISRDDSQSMLYVQMNNLKTEDTAMYYCVSGAYYGNSKAFDYWGQGTLVTVSA

SEQ ID NO: 746 - protein, 118 aa, Synthetic construct
EVQLVESGGGLVQPGGSLRLSCAASGFTFSNYYLNWVRQAPGKGLEWVGDIRLKSNNYEKHYAESVKGRFTISRDDSKNSLYLQMNSLKTEDTAVYYCAREGDYFDYWGQGTLVTVSS

SEQ ID NO: 747 - protein, 118 aa, Synthetic construct
EVQLVESGGGLVQPGGSLRLSCAASGFTFSNYYLNWVRQAPGKGLEWVADIRLKSNNYEKHYAESVKGRFTISRDDSKNSLYLQMNSLKTEDTAVYYCIREGDYFDYWGQGTTVTVSS

SEQ ID NO: 748 - protein, 119 aa, Synthetic construct
EVQFVESGGGLVQPKGSLKLSCAASGFSFNIYAMNWVRQAPGKGLEWVARIRSKSNDYATFYADSVKDRFTISRDDSESMLYLQMNNLKIEDTAMYYCVSPYDGALAYWGQGTSVTVSS

SEQ ID NO: 749 - protein, 119 aa, Synthetic construct
EVQFVESGGGLVQPKGSLKLSCEVSGFSFNTYAMNWVRQAPGKGLEWVARIRNKTNNYATFYADSVKDRFTISRDDSKNTLYLQMNNLKAEDTAMYFCASPYDGSFAYWGQGTLVTVSA

SEQ ID NO: 750 - protein, 120 aa, Synthetic construct
EVQLVESGGGLVQPGGSLRLSCAASGFTFSDYYMSWVRQAPGKGLEWVGFIRNKPNGYTTEYSASVKGRFTISRDDSKNSLYLQMNSLKTEDTAVYYCARYTGGGYFDYWGQGTLVTVSS

SEQ ID NO: 751 - protein, 120 aa, Synthetic construct
EVQLVESGGGLVKPGGSLRLSCAASGFTFSNYCMNWVRQAPGKGLEWVAEIRLKSNNYVTNYVAPVKGRFTISRDDSKNTLYLQMNSLKTEDTAVYYCTRDGYYVPFAYWGQGTLVTVSS

SEQ ID NO: 752 - protein, 120 aa, Synthetic construct
EVQLVESGGGLVQPGGSLRLSCAASGFTFSNYCMNWVRQAPGKGLEWVAEIRLKSNNYVTNYVDSVKGRFTISRDNAKNSLYLQMNSLRAEDTAVYYCTRDGYYVPFAYWGQGTLVTVSS

SEQ ID NO: 753 - protein, 120 aa, Synthetic construct
EVQLLESGGGLVQPGGSLRLSCAASGFTFSNYCMNWVRQAPGKGLEWVAEIRLKSNNYVTNYVDSVKGRFTISRDNSKNTLYLQMNSLRAEDTAVYYCTRDGYYVPFAYWGQGTLVTVSS

SEQ ID NO: 754 - protein, 128 aa, Synthetic construct
QVQLVESGGGLVQPGRSLRLSCAASGFTFSNAWMHWVRQAPGKGLEWVAQIKDRASGYNNYYAESVKGRFTISRDDSKNSIYLQMNSLKTEDTAVYYCRYVHYAQSVSAFFQYGVDAWGQGTTVTVSS

SEQ ID NO: 755 - protein, 128 aa, Synthetic construct
QVQLVESGGGLVQPGRSLRLSCAASGFTFSNAWMHWVRQAPGKGLEWVAQIKDKSNNYATYYAESVKGRFTISRDDSKNSIYLQMNSLKTEDTAVYYCRYVHYGAGGSGGSYYGVDAWGQGTTVTVSS

SEQ ID NO: 756 - protein, 128 aa, Synthetic construct
QVQLVESGGGLVQPGRSLRLSCAASGFTFSNAWMHWVRQAPGKGLEWVAQIKDRSNGYATYYAESVKGRFTISRDDSKNSIYLQMNSLKTEDTAVYYCRYVHYTTFTGVSFQYGVDAWGQGTTVTVSS

SEQ ID NO: 757 - protein, 128 aa, Synthetic construct
QVQLVESGGGLVQPGRSLRLSCAASGFTFSNAWMHWVRQAPGKGLEWVAQIKDKANGYNTYYAESVKGRFTISRDDSKNSIYLQMNSLKTEDTAVYYCRYVHYTTFGGFGFSYGVDAWGQGTTVTVSS

SEQ ID NO: 758 - protein, 128 aa, Synthetic construct
QVQLVESGGGLVQPGRSLRLSCAASGFTFSNAWMHWVRQAPGKGLEWVAQIKDKSSGYATYYAESVKGRFTISRDDSKNSIYLQMNSLKTEDTAVYYCRYVHYTTFVGGYPSYGVDAWGQGTTVTVSS

SEQ ID NO: 759 - protein, 127 aa, Synthetic construct
QVQLVESGGGLVQPGRSLRLSCAASGFTFSNAWMHWVRQAPGKGLEWVAQIKDRQNNYATYYAESVKGRFTISRDDSKNSIYLQMNSLKTEDTAVYYCRYVHYTTYFGGSYGGVDAWGQGTTVTVSS

SEQ ID NO: 760 - protein, 128 aa, Synthetic construct
QVQLVESGGGLVQPGRSLRLSCAASGFTFSNAWMHWVRQAPGKGLEWVAQIKDKGNSYATYYAPSVKGRFTISRDDSKNSIYLQMNSLKTEDTAVYYCRYVHYTTVSFLGFKYGVDAWGQGTTVTVSS

SEQ ID NO: 761 - protein, 121 aa, Synthetic construct
EVQLVETGGGLVQPKGSLKLSCAASGFTFNTNAMNWVRQAPGKGLEWVVRIRTKSNNYATYYADSVKDRFTISRDDSQSMLYLQMNNLKTEDTAMYYCVRGGTGTGAMDYWGQGTSVTVSS

SEQ ID NO: 762 - protein, 115 aa, Synthetic construct
EVQVVESGGGLVQPKGSLKLSCAASGFTFNTYAMNWVRQAPGKGLEWVARIRSKSNNYATYYADSVKDRFTISRDDSQSMVYLQMNNLKTEDTAMYYCVGGGDFWGQGTALTVSS

SEQ ID NO: 763 - protein, 135 aa, Synthetic construct
MEAPAQLLFLLLLWLPDTTGEVQVVESGGGLVQPKGSLKLSCAASGFTFNTYAMNWVRQAPGKGLEWVARIRSKSNNYATYYADSVKDRFTISRDDSQSMVYLQMNNLKTEDTAMYYCVGGGDFWGQGTALTVSS

SEQ ID NO: 764 - protein, 121 aa, Synthetic construct
EVQLVESGGGLVQPGGSLKLSCAASGFTFSTYAMHWVRQASGKGLEWVGRIRTKSSNYATYYAASVKGRFTISRDDSKNTAYLQMNSLKTEDTAVYYCTRDQGIRRQFAYWGQGTLVTVSS

SEQ ID NO: 765 - protein, 121 aa, Synthetic construct
EVQLVESGGGLVQPGGSLKLSCAASGFTFSTYAMHWVRQASGKGLEWVGRIRTKSSNYATYYAASVKGRFTISRDDSKNTAYLQMNSLKTEDTAVYYCTRDLGIRRQFAYWGQGTLVTVSS

SEQ ID NO: 766 - protein, 121 aa, Synthetic construct
EVQLVESGGGLVQPGGSLKLSCAASGFTFSTYAQHWVRQASGKGLEWVGRIRTKSSNYATYYAASVKGRFTISRDDSKNTAYLQMNSLKTEDTAVYYCTRDMGIRRQFAYWGQGTLVTVSS

SEQ ID NO: 767 - protein, 121 aa, Synthetic construct
EVQLVESGGGLVQPGGSLKLSCAASGFTFSTYALHWVRQASGKGLEWVGRIRTKSSNYATYYAASVKGRFTISRDDSKNTAYLQMNSLKTEDTAVYYCTRDMGIRRQFAYWGQGTLVTVSS

SEQ ID NO: 768 - protein, 119 aa, Synthetic construct
QVQLVESGGGLVQPGGSLRLSCAASGFTFSSYWMSWVRQAPGKGLEWVGFIRSKAYGGTTEYAASVKGRFTISRDDSKSIAYLQMNSLKTEDTAVYYCTRDGGSYFDYWGQGTLVTVSS

SEQ ID NO: 769 - protein, 114 aa, Synthetic construct
EVQLVESGGRLVQPKGSLKLSCAASGFTFNTYAMYWIRQAPGKGLEWVARIRSKSYNYATYYADSVKDRFTISRDDSQSMLYLQMNNLKTADTAMYYCVSEGFWGQGTSVTVSS

SEQ ID NO: 770 - protein, 125 aa, Synthetic construct
EVQLVESGGGLVQPKGSLKLSCAASGFTFNTYAMNWVRQAPGKGLEWVARIRSKYNNYATYYADSVKDRFTISRDDSQSLLYLQMNNLKTEDTAMYYCVRHGNFGNSYVSWFAYWGQGTLVTVSS

SEQ ID NO: 771 - protein, 125 aa, Synthetic construct
EVQLVESGGGLVQPGGSLKLSCAASGFTFNTYAMNWVRQAPGKGLEWVGRIRSKYNNYATYYADSVKDRFTISRDDSKNTAYLQMNSLKTEDTAVYYCVRHGNFGNSYVSWFAYWGQGTLVTVSS

SEQ ID NO: 772 - protein, 124 aa, Synthetic construct
EVQLVESGGGLVQPGGSLKLSCAASGFTFNKYAMNWVRQAPGKGLEWVARIRSKYNNYATYYADSVKDRFTISRDDSKNTAYLQMNNLKTEDTAVYYCVRHGNFGNSYISYWAYWGQGTLVTVS

SEQ ID NO: 773 - protein, 125 aa, Synthetic construct
EVQLVESGGGLVQPGGSLRLSCAASGFTFNTYAMNWVRQAPGKGLEWVARIRSKYNNYATYYADSVKGRFTISRDDSKNTLYLQMNSLRAEDTAVYYCVRHGNFGNSYVSWFAYWGQGTTVTVSS

SEQ ID NO: 774 - protein, 125 aa, Synthetic construct
EVQLVESGGGLVQPGGSLRLSCAASGFTFNTYAMNWVRQAPGKGLEWVARIRSKYNNYATYYADSVKGRFTISRDDSKNTLYLQMNSLRAEDTAVYYCVRHGNFGNSYVSYFAYWGQGTTVTVSS

SEQ ID NO: 775 - protein, 125 aa, Synthetic construct
EVQLVESGGGLVQPGGSLRLSCAASGFTFNTYAMNWVRQAPGKGLEWVARIRSKYNNYATYYADSVKGRFTISRDDAKNTLYLQMSSLRAEDTAVYYCVRHGNFGNSYVSWFAYWGQGTLVTVKP

SEQ ID NO: 776 - protein, 125 aa, Synthetic construct
EVQLVESGGGLVQPGGSLRLSCAASGFTFNTYAMNWVRQAPGKCLEWVARIRSKYNNYATYYADSVKGRFTISRDDAKNTLYLQMSSLRAEDTAVYYCVRHGNFGNSYVSWFAYWGQGTLVTVKP

SEQ ID NO: 777 - protein, 125 aa, Synthetic construct
EVQLVESGGGLVQPGGSLRLSCAASGFTFNTYAMNWVRQAPGKGLEWVARIRSKYNNYATYYADSVKGRFTISRDDAKNTLYLQMSSLRAEDTAVYYCVRHGNFGNSYVSWFAYWGCGTLVTVKP

SEQ ID NO: 778 - protein, 125 aa, Synthetic construct
EVQLVESGGGLVQPGGSLRLSCAASGFTFSTYAMNWVRQAPGKGLEWVARIRSKYNNYATYYADSVKGRFTISRDDAKNTLYLQMSSLRAEDTAVYYCVRHGNFGNSYVSWFAYWGQGTLVTVSS

SEQ ID NO: 779 - protein, 125 aa, Synthetic construct
EVQLVESGGGLVQPGGSLRLSCAASGFTFNTYAMNWVRQAPGKGLEWVSRIRSKYNNYATYYADSVKGRFTISRDDAKNTLYLQMSSLRAEDTAVYYCVRHGNFGNSYVSWFAYWGQGTLVTVSS

SEQ ID NO: 780 - protein, 125 aa, Synthetic construct
EVQLVESGGGLVQPGGSLRLSCAASGFTFSTYAMNWVRQAPGKGLEWVSRIRSKYNNYATYYADSVKGRFTISRDDAKNTLYLQMSSLRAEDTAVYYCVRHGNFGNSYVSWFAYWGQGTLVTVSS

SEQ ID NO: 781 - protein, 125 aa, Synthetic construct
EVQLVESGGGLVQPGGSLRLSCAASGFTFSTYAMNWVRQAPGKCLEWVARIRSKYNNYATYYADSVKGRFTISRDDAKNTLYLQMSSLRAEDTAVYYCVRHGNFGNSYVSWFAYWGQGTLVTVSS

SEQ ID NO: 782 - protein, 125 aa, Synthetic construct
EVQLVESGGGLVQPGGSLRLSCAASGFTFNTYAMNWVRQAPGKCLEWVSRIRSKYNNYATYYADSVKGRFTISRDDAKNTLYLQMSSLRAEDTAVYYCVRHGNFGNSYVSWFAYWGQGTLVTVSS

SEQ ID NO: 783 - protein, 125 aa, Synthetic construct
EVQLVESGGGLVQPGGSLRLSCAASGFTFSTYAMNWVRQAPGKCLEWVSRIRSKYNNYATYYADSVKGRFTISRDDAKNTLYLQMSSLRAEDTAVYYCVRHGNFGNSYVSWFAYWGQGTLVTVSS

SEQ ID NO: 784 - protein, 125 aa, Synthetic construct
EVQLVESGGGLVQPGGSLRLSCAASGFTFSTYAMNWVRQAPGKCLEWVGRIRSKYNNYATYYADSVKDRFTISRDDSKNSLYLQMNSLKTEDTAVYYCVRHGNFGNSYVSWFAYWGQGTLVTVSS

SEQ ID NO: 785 - protein, 125 aa, Synthetic construct
EVKLVESGGGLVQPGGSLRLSCAASGFTFNTYAMNWVRQAPGKCLEWVARIRSKYNNYATYYADSVKDRFTISRDDSKSSLYLQMNNLKTEDTAMYYCVRHGNFGNSYVSWFAYWGQGTLVTVSS

SEQ ID NO: 786 - protein, 125 aa, Synthetic construct
EVKLVESGGGLVKPGRSLRLSCAASGFTFNTYAMNWVRQAPGKCLEWVARIRSKYNNYATYYADSVKDRFTISRDDSKSILYLQMNNLKTEDTAMYYCVRHGNFGNSYVSWFAYWGQGTLVTVSS

SEQ ID NO: 787 - protein, 125 aa, Synthetic construct
EVKLVESGGGLVKPGRSLRLSCAASGFTFNTYAMNWVRQAPGKCLEWVARIRSKYNNYATYYADSVKDRFTISRDDSKSILYLQMNSLKTEDTAMYYCVRHGNFGNSYVSWFAYWGQGTLVTVSS

SEQ ID NO: 788 - protein, 125 aa, Synthetic construct
EVQLLESGGGLVQPGGSLRLSCAASGFTFSTYAMNWVRQAPGKCLEWVSRIRSKYNNYATYYADSVKGRFTISRDDSKNTLYLQMNSLRAEDTAVYYCVRHGNFGNSYVSWFAYWGQGTLVTVSS

SEQ ID NO: 789 - protein, 125 aa, Synthetic construct
EVQLVESGGGLVQPGGSLRLSCAASGFTFSTYAMSWVRQAPGKCLEWVGRIRSKYNNYATYYADSVKGRFTISRDDSKNTLYLQMNSLRAEDTAVYYCVRHGNFGDSYVSWFAYWGQGTLVTVSS

SEQ ID NO: 790 - protein, 124 aa, Synthetic construct
EVQLVESGGGLVQPGGSLKLSCAASGFTFNKYAMNWVRQAPGKCLEWVARIRSKYNNYATYYADSVKDRFTISRDDSKNTAYLQMNNLKTEDTAVYYCVRHGNFGNSYISYWAYWGQGTLVTVS

SEQ ID NO: 791 - protein, 125 aa, Synthetic construct
EVQLVESGGGLVQPGGSLRLSCAASGFTFNTYAMNWVRQAPGKCLEWVARIRSKYNNYATYYADSVKGRFTISRDDSKNTLYLQMNSLRAEDTAVYYCVRHGNFGNSYVSWFAYWGQGTTVTVSS

SEQ ID NO: 792 - protein, 125 aa, Synthetic construct
EVQLVESGGGLVQPGGSLRLSCAASGFTFNTYAMNWVRQAPGKCLEWVARIRSKYNNYATYYADSVKGRFTISRDDSKNTLYLQMNSLRAEDTAVYYCVRHGNFGNSYVSYFAYWGQGTTVTVSS

SEQ ID NO: 793 - protein, 125 aa, Synthetic construct
EVQLVESGGGLVQPKGSLKLSCAASGFTFNTYAMNWVRQAPGKCLEWVARIRSKYNNYATYYADSVKDRFTISRDDSQSILYLQMNNLKTEDTAMYYCVRHGNFGNSYVSWFAYWGQGTLVTVSS

SEQ ID NO: 794 - protein, 122 aa, Synthetic construct
  VARIANT 97: note = X can be any amino acid
EVQLVESGGGLVQPKGSLKLSCAASGFTFNTYAMNWVRQAPGKGLEWVARIRSKSNNYATYYADSVKDRFTISRDDSQSMLYLQMNNLKTEDTAMYXCVRQWDYDVRAMNYWGQGTSVTVSS

SEQ ID NO: 795 - protein, 119 aa, Synthetic construct
EVHLVESGGGLVQPKGSLKLSCAASGFTFNTYAMHWVRQAPGKGLEWVARIRNKSNNYATYYADSVKDRFTISRDDSQSMLFLQMDNLKTEDTAIYYCVRGGLSPFDYWGQGTTLTVSS

SEQ ID NO: 796 - protein, 141 aa, Synthetic construct
MLVLQWVLVTALFQGVHCAVQLVESGGGLVQPGGSLKITCAASGFTFTNAAMYWVRQAPGKGLEWVARIRTKANNYATYYADSVKGRFTISRDDSKSTVYLQMDSVKTEDTATYYCIVVVLTTTRDYFDYWGQGVLVTVSS

SEQ ID NO: 797 - protein, 127 aa, Synthetic construct
EVQLLESGGGLVQPGGSLRLSCAASGFTFSSYAMNWVRQAPGKGLEWVAGISSSGRYTGYADSVKGRFTISRDNSKNTLYLQMNSLRAEDTAVYYCAKSVGNGNSWSGYIATSIDAWGQGTLVTVSS

SEQ ID NO: 798 - protein, 127 aa, Synthetic construct
EVQLLESGGGLVQPGGSLRLSCAASGFTFSSYAMSWVRQAPGKGLEWVAGISSSGRYTGYADSVKGRFTISRDNSKNTLYLQMNSLRAEDTAVYYCAKSVGNGNSWSGYVATSIDAWGQGTLVTVSS

SEQ ID NO: 799 - protein, 124 aa, Synthetic construct
EVQLVESGGGLVQPKGSLKLSCAASGFTFNTYAMHWVRQAPGKGLEWVARIRSKSSNYATYYADSVKDRFTISRDDSQSIVYLQMNNLKTEDTAMYYCVRAWDYGSSWDYFDYWGQGTSVTVSS

SEQ ID NO: 800 - protein, 118 aa, Synthetic construct
EVQLVESGGGLVKPGGSLRLSCAASGFTFNNAAMYWVRQAPGKGLEWVARIRTKPNNYATSYADSVKGRFTISRDDSKNTLYLQMNSLKTEDTAVYYCTADYSRGDRWGQGTMVTVSS

SEQ ID NO: 801 - protein, 118 aa, Synthetic construct
EMQLVESGGGLVQPKESLKISCAASGFTFNNAAMYWVRQAPGKGLEWVARIRTKPNNYATSYADSVKGRFTISRDDSKSMVYLQMDNLKSEDTAMYYCTADYSRGDRWGQGVMVTVSS

SEQ ID NO: 802 - protein, 119 aa, Synthetic construct
EVQLVESGGGLVQPKGSLKLSCAASGFAFNSYAMHWVCQAPGKGLEWVARIRIKSGNYATSYAGSVTDRFTVSRDDSQNLFYLQMNNLKTEDTAMYYCVREWEGAMDYWGQGTSVTVSS

SEQ ID NO: 803 - protein, 118 aa, Synthetic construct
EVMLVESGGGLVQPKGSLKLSCAASGFTFNNYAMNWVRQAPGKGLEWVARIRSKSNNYATFYADSVKDRFTISRDDSQSLYLQMNNLKTEDTAYCVRRGASGIDYAMWGQGTSLTVSS

SEQ ID NO: 804 - protein, 138 aa, Synthetic construct
MLVLQWVLVTALFQGVHCAVQLVESGGGLVQPKESLKISCAASGFTFSNAAMYWVRQAPGKGLEWVARIRSKPNNYATYYTDSVKGRFTISRDDSKSMVHLQMDNLKTEDTAMYYCTVGGNNYAAAYWGQGTLVTVSS

SEQ ID NO: 805 - protein, 125 aa, Synthetic construct
EVQLVESGGGLVQPGGSLKLSCAASGFTFNTYAMNWVRQAPGKGLEWVARIRSKYNNYATYYADSVKDRFTISRDDSKNTAYLQMNNLKTEDTAVYYCVRHGNFGNSYVSWFAYWGQGTLVTVSA

SEQ ID NO: 806 - protein, 125 aa, Synthetic construct
EVQLVESGGGLVQPGGSLKLSCAASGFTFNTYAMNWVRQAPGKGLEWVARIRSKYINYATYYADSVKDRFTISRDDSKNTAYLQMNNLKTEDTAVYYCVRHGNFGNSYVSWFAYWGQGTLVTVSA

SEQ ID NO: 807 - protein, 125 aa, Synthetic construct
EVQLVESGGGLVQPGGSLKLSCAASGFTFNTYAMNWVRQAPGKGLEWVARIRSKYANYATYYADSVKDRFTISRDDSKNTAYLQMNNLKTEDTAVYYCVRHGNFGNSYVSWFAYWGQGTLVTVSA

SEQ ID NO: 808 - protein, 124 aa, Synthetic construct
QVQLVESGGGLVQPGGSLRLSCAASGFTFSNYAMNWVRQAPGKGLEWVSRISYSGSDTYYADSVKGRFTISRDNSKNTLYLQMNSLRAEDTAVYYCAREGEFGFMYSTLVFDSWGQGTLVTVSS

SEQ ID NO: 809 - protein, 125 aa, Synthetic construct
EVKLVESGGGLVQPGGSLRLSCAASGFTFATYAMNWVRQAPGKGLEWVARIRSKYNNYATYYADSVKDRFTISRDDSKSSLYLQMNNLKTEDTAMYYCVRHGNFGNSYVSWFAYWGQGTLVTVSS

SEQ ID NO: 810 - protein, 125 aa, Synthetic construct
EVKLVESGGGLVQPGGSLRLSCAASGFTFCTYAMNWVRQAPGKGLEWVARIRSKYNNYATYYADSVKDRFTISRDDSKSSLYLQMNNLKTEDTAMYYCVRHGNFGNSYVSWFAYWGQGTLVTVSS

SEQ ID NO: 811 - protein, 125 aa, Synthetic construct
EVKLVESGGGLVQPGGSLRLSCAASGFTFDTYAMNWVRQAPGKGLEWVARIRSKYNNYATYYADSVKDRFTISRDDSKSSLYLQMNNLKTEDTAMYYCVRHGNFGNSYVSWFAYWGQGTLVTVSS

SEQ ID NO: 812 - protein, 125 aa, Synthetic construct
EVKLVESGGGLVQPGGSLRLSCAASGFTFFTYAMNWVRQAPGKGLEWVARIRSKYNNYATYYADSVKDRFTISRDDSKSSLYLQMNNLKTEDTAMYYCVRHGNFGNSYVSWFAYWGQGTLVTVSS

SEQ ID NO: 813 - protein, 125 aa, Synthetic construct
EVKLVESGGGLVQPGGSLRLSCAASGFTFGTYAMNWVRQAPGKGLEWVARIRSKYNNYATYYADSVKDRFTISRDDSKSSLYLQMNNLKTEDTAMYYCVRHGNFGNSYVSWFAYWGQGTLVTVSS

SEQ ID NO: 814 - protein, 125 aa, Synthetic construct
EVKLVESGGGLVQPGGSLRLSCAASGFTFHTYAMNWVRQAPGKGLEWVARIRSKYNNYATYYADSVKDRFTISRDDSKSSLYLQMNNLKTEDTAMYYCVRHGNFGNSYVSWFAYWGQGTLVTVSS

SEQ ID NO: 815 - protein, 125 aa, Synthetic construct
EVKLVESGGGLVQPGGSLRLSCAASGFTFKTYAMNWVRQAPGKGLEWVARIRSKYNNYATYYADSVKDRFTISRDDSKSSLYLQMNNLKTEDTAMYYCVRHGNFGNSYVSWFAYWGQGTLVTVSS

SEQ ID NO: 816 - protein, 125 aa, Synthetic construct
EVKLVESGGGLVQPGGSLRLSCAASGFTFLTYAMNWVRQAPGKGLEWVARIRSKYNNYATYYADSVKDRFTISRDDSKSSLYLQMNNLKTEDTAMYYCVRHGNFGNSYVSWFAYWGQGTLVTVSS

SEQ ID NO: 817 - protein, 125 aa, Synthetic construct
EVKLVESGGGLVQPGGSLRLSCAASGFTFPTYAMNWVRQAPGKGLEWVARIRSKYNNYATYYADSVKDRFTISRDDSKSSLYLQMNNLKTEDTAMYYCVRHGNFGNSYVSWFAYWGQGTLVTVSS

SEQ ID NO: 818 - protein, 125 aa, Synthetic construct
EVKLVESGGGLVQPGGSLRLSCAASGFTFQTYAMNWVRQAPGKGLEWVARIRSKYNNYATYYADSVKDRFTISRDDSKSSLYLQMNNLKTEDTAMYYCVRHGNFGNSYVSWFAYWGQGTLVTVSS

SEQ ID NO: 819 - protein, 125 aa, Synthetic construct
EVKLVESGGGLVQPGGSLRLSCAASGFTFRTYAMNWVRQAPGKGLEWVARIRSKYNNYATYYADSVKDRFTISRDDSKSSLYLQMNNLKTEDTAMYYCVRHGNFGNSYVSWFAYWGQGTLVTVSS

SEQ ID NO: 820 - protein, 125 aa, Synthetic construct
EVKLVESGGGLVQPGGSLRLSCAASGFTFTTYAMNWVRQAPGKGLEWVARIRSKYNNYATYYADSVKDRFTISRDDSKSSLYLQMNNLKTEDTAMYYCVRHGNFGNSYVSWFAYWGQGTLVTVSS

SEQ ID NO: 821 - protein, 125 aa, Synthetic construct
EVKLVESGGGLVQPGGSLRLSCAASGFTFVTYAMNWVRQAPGKGLEWVARIRSKYNNYATYYADSVKDRFTISRDDSKSSLYLQMNNLKTEDTAMYYCVRHGNFGNSYVSWFAYWGQGTLVTVSS

SEQ ID NO: 822 - protein, 125 aa, Synthetic construct
EVKLVESGGGLVQPGGSLRLSCAASGFTFWTYAMNWVRQAPGKGLEWVARIRSKYNNYATYYADSVKDRFTISRDDSKSSLYLQMNNLKTEDTAMYYCVRHGNFGNSYVSWFAYWGQGTLVTVSS

SEQ ID NO: 823 - protein, 125 aa, Synthetic construct
EVKLVESGGGLVQPGGSLRLSCAASGFTFNAYAMNWVRQAPGKGLEWVARIRSKYNNYATYYADSVKDRFTISRDDSKSSLYLQMNNLKTEDTAMYYCVRHGNFGNSYVSWFAYWGQGTLVTVSS

SEQ ID NO: 824 - protein, 125 aa, Synthetic construct
EVKLVESGGGLVQPGGSLRLSCAASGFTFNCYAMNWVRQAPGKGLEWVARIRSKYNNYATYYADSVKDRFTISRDDSKSSLYLQMNNLKTEDTAMYYCVRHGNFGNSYVSWFAYWGQGTLVTVSS

SEQ ID NO: 825 - protein, 125 aa, Synthetic construct
EVKLVESGGGLVQPGGSLRLSCAASGFTFNDYAMNWVRQAPGKGLEWVARIRSKYNNYATYYADSVKDRFTISRDDSKSSLYLQMNNLKTEDTAMYYCVRHGNFGNSYVSWFAYWGQGTLVTVSS

SEQ ID NO: 826 - protein, 125 aa, Synthetic construct
EVKLVESGGGLVQPGGSLRLSCAASGFTFNEYAMNWVRQAPGKGLEWVARIRSKYNNYATYYADSVKDRFTISRDDSKSSLYLQMNNLKTEDTAMYYCVRHGNFGNSYVSWFAYWGQGTLVTVSS

SEQ ID NO: 827 - protein, 125 aa, Synthetic construct
EVKLVESGGGLVQPGGSLRLSCAASGFTFNFYAMNWVRQAPGKGLEWVARIRSKYNNYATYYADSVKDRFTISRDDSKSSLYLQMNNLKTEDTAMYYCVRHGNFGNSYVSWFAYWGQGTLVTVSS

SEQ ID NO: 828 - protein, 125 aa, Synthetic construct
EVKLVESGGGLVQPGGSLRLSCAASGFTFNHYAMNWVRQAPGKGLEWVARIRSKYNNYATYYADSVKDRFTISRDDSKSSLYLQMNNLKTEDTAMYYCVRHGNFGNSYVSWFAYWGQGTLVTVSS

SEQ ID NO: 829 - protein, 125 aa, Synthetic construct
EVKLVESGGGLVQPGGSLRLSCAASGFTFNLYAMNWVRQAPGKGLEWVARIRSKYNNYATYYADSVKDRFTISRDDSKSSLYLQMNNLKTEDTAMYYCVRHGNFGNSYVSWFAYWGQGTLVTVSS

SEQ ID NO: 830 - protein, 125 aa, Synthetic construct
EVKLVESGGGLVQPGGSLRLSCAASGFTFNNYAMNWVRQAPGKGLEWVARIRSKYNNYATYYADSVKDRFTISRDDSKSSLYLQMNNLKTEDTAMYYCVRHGNFGNSYVSWFAYWGQGTLVTVSS

SEQ ID NO: 831 - protein, 125 aa, Synthetic construct
EVKLVESGGGLVQPGGSLRLSCAASGFTFNQYAMNWVRQAPGKGLEWVARIRSKYNNYATYYADSVKDRFTISRDDSKSSLYLQMNNLKTEDTAMYYCVRHGNFGNSYVSWFAYWGQGTLVTVSS

SEQ ID NO: 832 - protein, 125 aa, Synthetic construct
EVKLVESGGGLVQPGGSLRLSCAASGFTFNWYAMNWVRQAPGKGLEWVARIRSKYNNYATYYADSVKDRFTISRDDSKSSLYLQMNNLKTEDTAMYYCVRHGNFGNSYVSWFAYWGQGTLVTVSS

SEQ ID NO: 833 - protein, 125 aa, Synthetic construct
EVKLVESGGGLVQPGGSLRLSCAASGFTFNYYAMNWVRQAPGKGLEWVARIRSKYNNYATYYADSVKDRFTISRDDSKSSLYLQMNNLKTEDTAMYYCVRHGNFGNSYVSWFAYWGQGTLVTVSS

SEQ ID NO: 834 - protein, 125 aa, Synthetic construct
EVKLVESGGGLVQPGGSLRLSCAASGFTFNTAAMNWVRQAPGKGLEWVARIRSKYNNYATYYADSVKDRFTISRDDSKSSLYLQMNNLKTEDTAMYYCVRHGNFGNSYVSWFAYWGQGTLVTVSS

SEQ ID NO: 835 - protein, 125 aa, Synthetic construct
EVKLVESGGGLVQPGGSLRLSCAASGFTFNTCAMNWVRQAPGKGLEWVARIRSKYNNYATYYADSVKDRFTISRDDSKSSLYLQMNNLKTEDTAMYYCVRHGNFGNSYVSWFAYWGQGTLVTVSS

SEQ ID NO: 836 - protein, 125 aa, Synthetic construct
EVKLVESGGGLVQPGGSLRLSCAASGFTFNTFAMNWVRQAPGKGLEWVARIRSKYNNYATYYADSVKDRFTISRDDSKSSLYLQMNNLKTEDTAMYYCVRHGNFGNSYVSWFAYWGQGTLVTVSS

SEQ ID NO: 837 - protein, 125 aa, Synthetic construct
EVKLVESGGGLVQPGGSLRLSCAASGFTFNTGAMNWVRQAPGKGLEWVARIRSKYNNYATYYADSVKDRFTISRDDSKSSLYLQMNNLKTEDTAMYYCVRHGNFGNSYVSWFAYWGQGTLVTVSS

SEQ ID NO: 838 - protein, 125 aa, Synthetic construct
EVKLVESGGGLVQPGGSLRLSCAASGFTFNTHAMNWVRQAPGKGLEWVARIRSKYNNYATYYADSVKDRFTISRDDSKSSLYLQMNNLKTEDTAMYYCVRHGNFGNSYVSWFAYWGQGTLVTVSS

SEQ ID NO: 839 - protein, 125 aa, Synthetic construct
EVKLVESGGGLVQPGGSLRLSCAASGFTFNTIAMNWVRQAPGKGLEWVARIRSKYNNYATYYADSVKDRFTISRDDSKSSLYLQMNNLKTEDTAMYYCVRHGNFGNSYVSWFAYWGQGTLVTVSS

SEQ ID NO: 840 - protein, 125 aa, Synthetic construct
EVKLVESGGGLVQPGGSLRLSCAASGFTFNTKAMNWVRQAPGKGLEWVARIRSKYNNYATYYADSVKDRFTISRDDSKSSLYLQMNNLKTEDTAMYYCVRHGNFGNSYVSWFAYWGQGTLVTVSS

SEQ ID NO: 841 - protein, 125 aa, Synthetic construct
EVKLVESGGGLVQPGGSLRLSCAASGFTFNTLAMNWVRQAPGKGLEWVARIRSKYNNYATYYADSVKDRFTISRDDSKSSLYLQMNNLKTEDTAMYYCVRHGNFGNSYVSWFAYWGQGTLVTVSS

SEQ ID NO: 842 - protein, 125 aa, Synthetic construct
EVKLVESGGGLVQPGGSLRLSCAASGFTFNTMAMNWVRQAPGKGLEWVARIRSKYNNYATYYADSVKDRFTISRDDSKSSLYLQMNNLKTEDTAMYYCVRHGNFGNSYVSWFAYWGQGTLVTVSS

SEQ ID NO: 843 - protein, 125 aa, Synthetic construct
EVKLVESGGGLVQPGGSLRLSCAASGFTFNTNAMNWVRQAPGKGLEWVARIRSKYNNYATYYADSVKDRFTISRDDSKSSLYLQMNNLKTEDTAMYYCVRHGNFGNSYVSWFAYWGQGTLVTVSS

SEQ ID NO: 844 - protein, 125 aa, Synthetic construct
EVKLVESGGGLVQPGGSLRLSCAASGFTFNTPAMNWVRQAPGKGLEWVARIRSKYNNYATYYADSVKDRFTISRDDSKSSLYLQMNNLKTEDTAMYYCVRHGNFGNSYVSWFAYWGQGTLVTVSS

SEQ ID NO: 845 - protein, 125 aa, Synthetic construct
EVKLVESGGGLVQPGGSLRLSCAASGFTFNTQAMNWVRQAPGKGLEWVARIRSKYNNYATYYADSVKDRFTISRDDSKSSLYLQMNNLKTEDTAMYYCVRHGNFGNSYVSWFAYWGQGTLVTVSS

SEQ ID NO: 846 - protein, 125 aa, Synthetic construct
EVKLVESGGGLVQPGGSLRLSCAASGFTFNTRAMNWVRQAPGKGLEWVARIRSKYNNYATYYADSVKDRFTISRDDSKSSLYLQMNNLKTEDTAMYYCVRHGNFGNSYVSWFAYWGQGTLVTVSS

SEQ ID NO: 847 - protein, 125 aa, Synthetic construct
EVKLVESGGGLVQPGGSLRLSCAASGFTFNTSAMNWVRQAPGKGLEWVARIRSKYNNYATYYADSVKDRFTISRDDSKSSLYLQMNNLKTEDTAMYYCVRHGNFGNSYVSWFAYWGQGTLVTVSS

SEQ ID NO: 848 - protein, 125 aa, Synthetic construct
EVKLVESGGGLVQPGGSLRLSCAASGFTFNTTAMNWVRQAPGKGLEWVARIRSKYNNYATYYADSVKDRFTISRDDSKSSLYLQMNNLKTEDTAMYYCVRHGNFGNSYVSWFAYWGQGTLVTVSS

SEQ ID NO: 849 - protein, 125 aa, Synthetic construct
EVKLVESGGGLVQPGGSLRLSCAASGFTFNTVAMNWVRQAPGKGLEWVARIRSKYNNYATYYADSVKDRFTISRDDSKSSLYLQMNNLKTEDTAMYYCVRHGNFGNSYVSWFAYWGQGTLVTVSS

SEQ ID NO: 850 - protein, 125 aa, Synthetic construct
EVKLVESGGGLVQPGGSLRLSCAASGFTFNTWAMNWVRQAPGKGLEWVARIRSKYNNYATYYADSVKDRFTISRDDSKSSLYLQMNNLKTEDTAMYYCVRHGNFGNSYVSWFAYWGQGTLVTVSS

SEQ ID NO: 851 - protein, 125 aa, Synthetic construct
EVKLVESGGGLVQPGGSLRLSCAASGFTFNTYAMNWVRQAPGKGLEWVARIRSKYNAYATYYADSVKDRFTISRDDSKSSLYLQMNNLKTEDTAMYYCVRHGNFGNSYVSWFAYWGQGTLVTVSS

SEQ ID NO: 852 - protein, 125 aa, Synthetic construct
EVKLVESGGGLVQPGGSLRLSCAASGFTFNTYAMNWVRQAPGKGLEWVARIRSKYNCYATYYADSVKDRFTISRDDSKSSLYLQMNNLKTEDTAMYYCVRHGNFGNSYVSWFAYWGQGTLVTVSS

SEQ ID NO: 853 - protein, 125 aa, Synthetic construct
EVKLVESGGGLVQPGGSLRLSCAASGFTFNTYAMNWVRQAPGKGLEWVARIRSKYNDYATYYADSVKDRFTISRDDSKSSLYLQMNNLKTEDTAMYYCVRHGNFGNSYVSWFAYWGQGTLVTVSS

SEQ ID NO: 854 - protein, 125 aa, Synthetic construct
EVKLVESGGGLVQPGGSLRLSCAASGFTFNTYAMNWVRQAPGKGLEWVARIRSKYNFYATYYADSVKDRFTISRDDSKSSLYLQMNNLKTEDTAMYYCVRHGNFGNSYVSWFAYWGQGTLVTVSS

SEQ ID NO: 855 - protein, 125 aa, Synthetic construct
EVKLVESGGGLVQPGGSLRLSCAASGFTFNTYAMNWVRQAPGKGLEWVARIRSKYNGYATYYADSVKDRFTISRDDSKSSLYLQMNNLKTEDTAMYYCVRHGNFGNSYVSWFAYWGQGTLVTVSS

SEQ ID NO: 856 - protein, 125 aa, Synthetic construct
EVKLVESGGGLVQPGGSLRLSCAASGFTFNTYAMNWVRQAPGKGLEWVARIRSKYNIYATYYADSVKDRFTISRDDSKSSLYLQMNNLKTEDTAMYYCVRHGNFGNSYVSWFAYWGQGTLVTVSS

SEQ ID NO: 857 - protein, 125 aa, Synthetic construct
EVKLVESGGGLVQPGGSLRLSCAASGFTFNTYAMNWVRQAPGKGLEWVARIRSKYNKYATYYADSVKDRFTISRDDSKSSLYLQMNNLKTEDTAMYYCVRHGNFGNSYVSWFAYWGQGTLVTVSS

SEQ ID NO: 858 - protein, 125 aa, Synthetic construct
EVKLVESGGGLVQPGGSLRLSCAASGFTFNTYAMNWVRQAPGKGLEWVARIRSKYNLYATYYADSVKDRFTISRDDSKSSLYLQMNNLKTEDTAMYYCVRHGNFGNSYVSWFAYWGQGTLVTVSS

SEQ ID NO: 859 - protein, 125 aa, Synthetic construct
EVKLVESGGGLVQPGGSLRLSCAASGFTFNTYAMNWVRQAPGKGLEWVARIRSKYNMYATYYADSVKDRFTISRDDSKSSLYLQMNNLKTEDTAMYYCVRHGNFGNSYVSWFAYWGQGTLVTVSS

SEQ ID NO: 860 - protein, 125 aa, Synthetic construct
EVKLVESGGGLVQPGGSLRLSCAASGFTFNTYAMNWVRQAPGKGLEWVARIRSKYNPYATYYADSVKDRFTISRDDSKSSLYLQMNNLKTEDTAMYYCVRHGNFGNSYVSWFAYWGQGTLVTVSS

SEQ ID NO: 861 - protein, 125 aa, Synthetic construct
EVKLVESGGGLVQPGGSLRLSCAASGFTFNTYAMNWVRQAPGKGLEWVARIRSKYNQYATYYADSVKDRFTISRDDSKSSLYLQMNNLKTEDTAMYYCVRHGNFGNSYVSWFAYWGQGTLVTVSS

SEQ ID NO: 862 - protein, 125 aa, Synthetic construct
EVKLVESGGGLVQPGGSLRLSCAASGFTFNTYAMNWVRQAPGKGLEWVARIRSKYNRYATYYADSVKDRFTISRDDSKSSLYLQMNNLKTEDTAMYYCVRHGNFGNSYVSWFAYWGQGTLVTVSS

SEQ ID NO: 863 - protein, 125 aa, Synthetic construct
EVKLVESGGGLVQPGGSLRLSCAASGFTFNTYAMNWVRQAPGKGLEWVARIRSKYNTYATYYADSVKDRFTISRDDSKSSLYLQMNNLKTEDTAMYYCVRHGNFGNSYVSWFAYWGQGTLVTVSS

SEQ ID NO: 864 - protein, 125 aa, Synthetic construct
EVKLVESGGGLVQPGGSLRLSCAASGFTFNTYAMNWVRQAPGKGLEWVARIRSKYNVYATYYADSVKDRFTISRDDSKSSLYLQMNNLKTEDTAMYYCVRHGNFGNSYVSWFAYWGQGTLVTVSS

SEQ ID NO: 865 - protein, 125 aa, Synthetic construct
EVKLVESGGGLVQPGGSLRLSCAASGFTFNTYAMNWVRQAPGKGLEWVARIRSKYNWYATYYADSVKDRFTISRDDSKSSLYLQMNNLKTEDTAMYYCVRHGNFGNSYVSWFAYWGQGTLVTVSS

SEQ ID NO: 866 - protein, 125 aa, Synthetic construct
EVKLVESGGGLVQPGGSLRLSCAASGFTFNTYAMNWVRQAPGKGLEWVARIRSKYNYYATYYADSVKDRFTISRDDSKSSLYLQMNNLKTEDTAMYYCVRHGNFGNSYVSWFAYWGQGTLVTVSS

SEQ ID NO: 867 - protein, 125 aa, Synthetic construct
EVKLVESGGGLVQPGGSLRLSCAASGFTFNTYAMNWVRQAPGKGLEWVARIRSKYNNYCTYYADSVKDRFTISRDDSKSSLYLQMNNLKTEDTAMYYCVRHGNFGNSYVSWFAYWGQGTLVTVSS

SEQ ID NO: 868 - protein, 125 aa, Synthetic construct
EVKLVESGGGLVQPGGSLRLSCAASGFTFNTYAMNWVRQAPGKGLEWVARIRSKYNNYDTYYADSVKDRFTISRDDSKSSLYLQMNNLKTEDTAMYYCVRHGNFGNSYVSWFAYWGQGTLVTVSS

SEQ ID NO: 869 - protein, 125 aa, Synthetic construct
EVKLVESGGGLVQPGGSLRLSCAASGFTFNTYAMNWVRQAPGKGLEWVARIRSKYNNYETYYADSVKDRFTISRDDSKSSLYLQMNNLKTEDTAMYYCVRHGNFGNSYVSWFAYWGQGTLVTVSS

SEQ ID NO: 870 - protein, 125 aa, Synthetic construct
EVKLVESGGGLVQPGGSLRLSCAASGFTFNTYAMNWVRQAPGKGLEWVARIRSKYNNYFTYYADSVKDRFTISRDDSKSSLYLQMNNLKTEDTAMYYCVRHGNFGNSYVSWFAYWGQGTLVTVSS

SEQ ID NO: 871 - protein, 125 aa, Synthetic construct
EVKLVESGGGLVQPGGSLRLSCAASGFTFNTYAMNWVRQAPGKGLEWVARIRSKYNNYGTYYADSVKDRFTISRDDSKSSLYLQMNNLKTEDTAMYYCVRHGNFGNSYVSWFAYWGQGTLVTVSS

SEQ ID NO: 872 - protein, 125 aa, Synthetic construct
EVKLVESGGGLVQPGGSLRLSCAASGFTFNTYAMNWVRQAPGKGLEWVARIRSKYNNYHTYYADSVKDRFTISRDDSKSSLYLQMNNLKTEDTAMYYCVRHGNFGNSYVSWFAYWGQGTLVTVSS

SEQ ID NO: 873 - protein, 125 aa, Synthetic construct
EVKLVESGGGLVQPGGSLRLSCAASGFTFNTYAMNWVRQAPGKGLEWVARIRSKYNNYITYYADSVKDRFTISRDDSKSSLYLQMNNLKTEDTAMYYCVRHGNFGNSYVSWFAYWGQGTLVTVSS

SEQ ID NO: 874 - protein, 125 aa, Synthetic construct
EVKLVESGGGLVQPGGSLRLSCAASGFTFNTYAMNWVRQAPGKGLEWVARIRSKYNNYKTYYADSVKDRFTISRDDSKSSLYLQMNNLKTEDTAMYYCVRHGNFGNSYVSWFAYWGQGTLVTVSS

SEQ ID NO: 875 - protein, 125 aa, Synthetic construct
EVKLVESGGGLVQPGGSLRLSCAASGFTFNTYAMNWVRQAPGKGLEWVARIRSKYNNYLTYYADSVKDRFTISRDDSKSSLYLQMNNLKTEDTAMYYCVRHGNFGNSYVSWFAYWGQGTLVTVSS

SEQ ID NO: 876 - protein, 125 aa, Synthetic construct
EVKLVESGGGLVQPGGSLRLSCAASGFTFNTYAMNWVRQAPGKGLEWVARIRSKYNNYMTYYADSVKDRFTISRDDSKSSLYLQMNNLKTEDTAMYYCVRHGNFGNSYVSWFAYWGQGTLVTVSS

SEQ ID NO: 877 - protein, 125 aa, Synthetic construct
EVKLVESGGGLVQPGGSLRLSCAASGFTFNTYAMNWVRQAPGKGLEWVARIRSKYNNYNTYYADSVKDRFTISRDDSKSSLYLQMNNLKTEDTAMYYCVRHGNFGNSYVSWFAYWGQGTLVTVSS

SEQ ID NO: 878 - protein, 125 aa, Synthetic construct
EVKLVESGGGLVQPGGSLRLSCAASGFTFNTYAMNWVRQAPGKGLEWVARIRSKYNNYPTYYADSVKDRFTISRDDSKSSLYLQMNNLKTEDTAMYYCVRHGNFGNSYVSWFAYWGQGTLVTVSS

SEQ ID NO: 879 - protein, 125 aa, Synthetic construct
EVKLVESGGGLVQPGGSLRLSCAASGFTFNTYAMNWVRQAPGKGLEWVARIRSKYNNYQTYYADSVKDRFTISRDDSKSSLYLQMNNLKTEDTAMYYCVRHGNFGNSYVSWFAYWGQGTLVTVSS

SEQ ID NO: 880 - protein, 125 aa, Synthetic construct
EVKLVESGGGLVQPGGSLRLSCAASGFTFNTYAMNWVRQAPGKGLEWVARIRSKYNNYRTYYADSVKDRFTISRDDSKSSLYLQMNNLKTEDTAMYYCVRHGNFGNSYVSWFAYWGQGTLVTVSS

SEQ ID NO: 881 - protein, 125 aa, Synthetic construct
EVKLVESGGGLVQPGGSLRLSCAASGFTFNTYAMNWVRQAPGKGLEWVARIRSKYNNYSTYYADSVKDRFTISRDDSKSSLYLQMNNLKTEDTAMYYCVRHGNFGNSYVSWFAYWGQGTLVTVSS

SEQ ID NO: 882 - protein, 125 aa, Synthetic construct
EVKLVESGGGLVQPGGSLRLSCAASGFTFNTYAMNWVRQAPGKGLEWVARIRSKYNNYVTYYADSVKDRFTISRDDSKSSLYLQMNNLKTEDTAMYYCVRHGNFGNSYVSWFAYWGQGTLVTVSS

SEQ ID NO: 883 - protein, 125 aa, Synthetic construct
EVKLVESGGGLVQPGGSLRLSCAASGFTFNTYAMNWVRQAPGKGLEWVARIRSKYNNYWTYYADSVKDRFTISRDDSKSSLYLQMNNLKTEDTAMYYCVRHGNFGNSYVSWFAYWGQGTLVTVSS

SEQ ID NO: 884 - protein, 125 aa, Synthetic construct
EVKLVESGGGLVQPGGSLRLSCAASGFTFNTYAMNWVRQAPGKGLEWVARIRSKYNNYYTYYADSVKDRFTISRDDSKSSLYLQMNNLKTEDTAMYYCVRHGNFGNSYVSWFAYWGQGTLVTVSS

SEQ ID NO: 885 - protein, 125 aa, Synthetic construct
EVKLVESGGGLVQPGGSLRLSCAASGFTFNTYAMNWVRQAPGKGLEWVARIRSKYNNYATYYADSVKDRFTISRDDSKSSLYLQMNNLKTEDTAMYYCVRAGNFGNSYVSWFAYWGQGTLVTVSS

SEQ ID NO: 886 - protein, 125 aa, Synthetic construct
EVKLVESGGGLVQPGGSLRLSCAASGFTFNTYAMNWVRQAPGKGLEWVARIRSKYNNYATYYADSVKDRFTISRDDSKSSLYLQMNNLKTEDTAMYYCVRCGNFGNSYVSWFAYWGQGTLVTVSS

SEQ ID NO: 887 - protein, 125 aa, Synthetic construct
EVKLVESGGGLVQPGGSLRLSCAASGFTFNTYAMNWVRQAPGKGLEWVARIRSKYNNYATYYADSVKDRFTISRDDSKSSLYLQMNNLKTEDTAMYYCVRFGNFGNSYVSWFAYWGQGTLVTVSS

SEQ ID NO: 888 - protein, 125 aa, Synthetic construct
EVKLVESGGGLVQPGGSLRLSCAASGFTFNTYAMNWVRQAPGKGLEWVARIRSKYNNYATYYADSVKDRFTISRDDSKSSLYLQMNNLKTEDTAMYYCVRIGNFGNSYVSWFAYWGQGTLVTVSS

SEQ ID NO: 889 - protein, 125 aa, Synthetic construct
EVKLVESGGGLVQPGGSLRLSCAASGFTFNTYAMNWVRQAPGKGLEWVARIRSKYNNYATYYADSVKDRFTISRDDSKSSLYLQMNNLKTEDTAMYYCVRKGNFGNSYVSWFAYWGQGTLVTVSS

SEQ ID NO: 890 - protein, 125 aa, Synthetic construct
EVKLVESGGGLVQPGGSLRLSCAASGFTFNTYAMNWVRQAPGKGLEWVARIRSKYNNYATYYADSVKDRFTISRDDSKSSLYLQMNNLKTEDTAMYYCVRLGNFGNSYVSWFAYWGQGTLVTVSS

SEQ ID NO: 891 - protein, 125 aa, Synthetic construct
EVKLVESGGGLVQPGGSLRLSCAASGFTFNTYAMNWVRQAPGKGLEWVARIRSKYNNYATYYADSVKDRFTISRDDSKSSLYLQMNNLKTEDTAMYYCVRPGNFGNSYVSWFAYWGQGTLVTVSS

SEQ ID NO: 892 - protein, 125 aa, Synthetic construct
EVKLVESGGGLVQPGGSLRLSCAASGFTFNTYAMNWVRQAPGKGLEWVARIRSKYNNYATYYADSVKDRFTISRDDSKSSLYLQMNNLKTEDTAMYYCVRQGNFGNSYVSWFAYWGQGTLVTVSS

SEQ ID NO: 893 - protein, 125 aa, Synthetic construct
EVKLVESGGGLVQPGGSLRLSCAASGFTFNTYAMNWVRQAPGKGLEWVARIRSKYNNYATYYADSVKDRFTISRDDSKSSLYLQMNNLKTEDTAMYYCVRRGNFGNSYVSWFAYWGQGTLVTVSS

SEQ ID NO: 894 - protein, 125 aa, Synthetic construct
EVKLVESGGGLVQPGGSLRLSCAASGFTFNTYAMNWVRQAPGKGLEWVARIRSKYNNYATYYADSVKDRFTISRDDSKSSLYLQMNNLKTEDTAMYYCVRSGNFGNSYVSWFAYWGQGTLVTVSS

SEQ ID NO: 895 - protein, 125 aa, Synthetic construct
EVKLVESGGGLVQPGGSLRLSCAASGFTFNTYAMNWVRQAPGKGLEWVARIRSKYNNYATYYADSVKDRFTISRDDSKSSLYLQMNNLKTEDTAMYYCVRTGNFGNSYVSWFAYWGQGTLVTVSS

SEQ ID NO: 896 - protein, 125 aa, Synthetic construct
EVKLVESGGGLVQPGGSLRLSCAASGFTFNTYAMNWVRQAPGKGLEWVARIRSKYNNYATYYADSVKDRFTISRDDSKSSLYLQMNNLKTEDTAMYYCVRVGNFGNSYVSWFAYWGQGTLVTVSS

SEQ ID NO: 897 - protein, 125 aa, Synthetic construct
EVKLVESGGGLVQPGGSLRLSCAASGFTFNTYAMNWVRQAPGKGLEWVARIRSKYNNYATYYADSVKDRFTISRDDSKSSLYLQMNNLKTEDTAMYYCVRWGNFGNSYVSWFAYWGQGTLVTVSS

SEQ ID NO: 898 - protein, 125 aa, Synthetic construct
EVKLVESGGGLVQPGGSLRLSCAASGFTFNTYAMNWVRQAPGKGLEWVARIRSKYNNYATYYADSVKDRFTISRDDSKSSLYLQMNNLKTEDTAMYYCVRYGNFGNSYVSWFAYWGQGTLVTVSS

SEQ ID NO: 899 - protein, 125 aa, Synthetic construct
EVKLVESGGGLVQPGGSLRLSCAASGFTFNTYAMNWVRQAPGKGLEWVARIRSKYNNYATYYADSVKDRFTISRDDSKSSLYLQMNNLKTEDTAMYYCVRHGNFANSYVSWFAYWGQGTLVTVSS

SEQ ID NO: 900 - protein, 125 aa, Synthetic construct
EVKLVESGGGLVQPGGSLRLSCAASGFTFNTYAMNWVRQAPGKGLEWVARIRSKYNNYATYYADSVKDRFTISRDDSKSSLYLQMNNLKTEDTAMYYCVRHGNFCNSYVSWFAYWGQGTLVTVSS

SEQ ID NO: 901 - protein, 125 aa, Synthetic construct
EVKLVESGGGLVQPGGSLRLSCAASGFTFNTYAMNWVRQAPGKGLEWVARIRSKYNNYATYYADSVKDRFTISRDDSKSSLYLQMNNLKTEDTAMYYCVRHGNFENSYVSWFAYWGQGTLVTVSS

SEQ ID NO: 902 - protein, 125 aa, Synthetic construct
EVKLVESGGGLVQPGGSLRLSCAASGFTFNTYAMNWVRQAPGKGLEWVARIRSKYNNYATYYADSVKDRFTISRDDSKSSLYLQMNNLKTEDTAMYYCVRHGNFFNSYVSWFAYWGQGTLVTVSS

SEQ ID NO: 903 - protein, 125 aa, Synthetic construct
EVKLVESGGGLVQPGGSLRLSCAASGFTFNTYAMNWVRQAPGKGLEWVARIRSKYNNYATYYADSVKDRFTISRDDSKSSLYLQMNNLKTEDTAMYYCVRHGNFHNSYVSWFAYWGQGTLVTVSS

SEQ ID NO: 904 - protein, 125 aa, Synthetic construct
EVKLVESGGGLVQPGGSLRLSCAASGFTFNTYAMNWVRQAPGKGLEWVARIRSKYNNYATYYADSVKDRFTISRDDSKSSLYLQMNNLKTEDTAMYYCVRHGNFINSYVSWFAYWGQGTLVTVSS

SEQ ID NO: 905 - protein, 125 aa, Synthetic construct
EVKLVESGGGLVQPGGSLRLSCAASGFTFNTYAMNWVRQAPGKGLEWVARIRSKYNNYATYYADSVKDRFTISRDDSKSSLYLQMNNLKTEDTAMYYCVRHGNFLNSYVSWFAYWGQGTLVTVSS

SEQ ID NO: 906 - protein, 125 aa, Synthetic construct
EVKLVESGGGLVQPGGSLRLSCAASGFTFNTYAMNWVRQAPGKGLEWVARIRSKYNNYATYYADSVKDRFTISRDDSKSSLYLQMNNLKTEDTAMYYCVRHGNFMNSYVSWFAYWGQGTLVTVSS

SEQ ID NO: 907 - protein, 125 aa, Synthetic construct
EVKLVESGGGLVQPGGSLRLSCAASGFTFNTYAMNWVRQAPGKGLEWVARIRSKYNNYATYYADSVKDRFTISRDDSKSSLYLQMNNLKTEDTAMYYCVRHGNFNNSYVSWFAYWGQGTLVTVSS

SEQ ID NO: 908 - protein, 125 aa, Synthetic construct
EVKLVESGGGLVQPGGSLRLSCAASGFTFNTYAMNWVRQAPGKGLEWVARIRSKYNNYATYYADSVKDRFTISRDDSKSSLYLQMNNLKTEDTAMYYCVRHGNFQNSYVSWFAYWGQGTLVTVSS

SEQ ID NO: 909 - protein, 125 aa, Synthetic construct
EVKLVESGGGLVQPGGSLRLSCAASGFTFNTYAMNWVRQAPGKGLEWVARIRSKYNNYATYYADSVKDRFTISRDDSKSSLYLQMNNLKTEDTAMYYCVRHGNFRNSYVSWFAYWGQGTLVTVSS

SEQ ID NO: 910 - protein, 125 aa, Synthetic construct
EVKLVESGGGLVQPGGSLRLSCAASGFTFNTYAMNWVRQAPGKGLEWVARIRSKYNNYATYYADSVKDRFTISRDDSKSSLYLQMNNLKTEDTAMYYCVRHGNFSNSYVSWFAYWGQGTLVTVSS

SEQ ID NO: 911 - protein, 125 aa, Synthetic construct
EVKLVESGGGLVQPGGSLRLSCAASGFTFNTYAMNWVRQAPGKGLEWVARIRSKYNNYATYYADSVKDRFTISRDDSKSSLYLQMNNLKTEDTAMYYCVRHGNFTNSYVSWFAYWGQGTLVTVSS

SEQ ID NO: 912 - protein, 125 aa, Synthetic construct
EVKLVESGGGLVQPGGSLRLSCAASGFTFNTYAMNWVRQAPGKGLEWVARIRSKYNNYATYYADSVKDRFTISRDDSKSSLYLQMNNLKTEDTAMYYCVRHGNFVNSYVSWFAYWGQGTLVTVSS

SEQ ID NO: 913 - protein, 125 aa, Synthetic construct
EVKLVESGGGLVQPGGSLRLSCAASGFTFNTYAMNWVRQAPGKGLEWVARIRSKYNNYATYYADSVKDRFTISRDDSKSSLYLQMNNLKTEDTAMYYCVRHGNFWNSYVSWFAYWGQGTLVTVSS

SEQ ID NO: 914 - protein, 125 aa, Synthetic construct
EVKLVESGGGLVQPGGSLRLSCAASGFTFNTYAMNWVRQAPGKGLEWVARIRSKYNNYATYYADSVKDRFTISRDDSKSSLYLQMNNLKTEDTAMYYCVRHGNFYNSYVSWFAYWGQGTLVTVSS

SEQ ID NO: 915 - protein, 125 aa, Synthetic construct
EVKLVESGGGLVQPGGSLRLSCAASGFTFNTYAMNWVRQAPGKGLEWVARIRSKYNNYATYYADSVKDRFTISRDDSKSSLYLQMNNLKTEDTAMYYCVRHGNFGNSYVCWFAYWGQGTLVTVSS

SEQ ID NO: 916 - protein, 125 aa, Synthetic construct
EVKLVESGGGLVQPGGSLRLSCAASGFTFNTYAMNWVRQAPGKGLEWVARIRSKYNNYATYYADSVKDRFTISRDDSKSSLYLQMNNLKTEDTAMYYCVRHGNFGNSYVEWFAYWGQGTLVTVSS

SEQ ID NO: 917 - protein, 125 aa, Synthetic construct
EVKLVESGGGLVQPGGSLRLSCAASGFTFNTYAMNWVRQAPGKGLEWVARIRSKYNNYATYYADSVKDRFTISRDDSKSSLYLQMNNLKTEDTAMYYCVRHGNFGNSYVFWFAYWGQGTLVTVSS

SEQ ID NO: 918 - protein, 125 aa, Synthetic construct
EVKLVESGGGLVQPGGSLRLSCAASGFTFNTYAMNWVRQAPGKGLEWVARIRSKYNNYATYYADSVKDRFTISRDDSKSSLYLQMNNLKTEDTAMYYCVRHGNFGNSYVHWFAYWGQGTLVTVSS

SEQ ID NO: 919 - protein, 125 aa, Synthetic construct
EVKLVESGGGLVQPGGSLRLSCAASGFTFNTYAMNWVRQAPGKGLEWVARIRSKYNNYATYYADSVKDRFTISRDDSKSSLYLQMNNLKTEDTAMYYCVRHGNFGNSYVKWFAYWGQGTLVTVSS

SEQ ID NO: 920 - protein, 125 aa, Synthetic construct
EVKLVESGGGLVQPGGSLRLSCAASGFTFNTYAMNWVRQAPGKGLEWVARIRSKYNNYATYYADSVKDRFTISRDDSKSSLYLQMNNLKTEDTAMYYCVRHGNFGNSYVLWFAYWGQGTLVTVSS

SEQ ID NO: 921 - protein, 125 aa, Synthetic construct
EVKLVESGGGLVQPGGSLRLSCAASGFTFNTYAMNWVRQAPGKGLEWVARIRSKYNNYATYYADSVKDRFTISRDDSKSSLYLQMNNLKTEDTAMYYCVRHGNFGNSYVNWFAYWGQGTLVTVSS

SEQ ID NO: 922 - protein, 125 aa, Synthetic construct
EVKLVESGGGLVQPGGSLRLSCAASGFTFNTYAMNWVRQAPGKGLEWVARIRSKYNNYATYYADSVKDRFTISRDDSKSSLYLQMNNLKTEDTAMYYCVRHGNFGNSYVPWFAYWGQGTLVTVSS

SEQ ID NO: 923 - protein, 125 aa, Synthetic construct
EVKLVESGGGLVQPGGSLRLSCAASGFTFNTYAMNWVRQAPGKGLEWVARIRSKYNNYATYYADSVKDRFTISRDDSKSSLYLQMNNLKTEDTAMYYCVRHGNFGNSYVQWFAYWGQGTLVTVSS

SEQ ID NO: 924 - protein, 125 aa, Synthetic construct
EVKLVESGGGLVQPGGSLRLSCAASGFTFNTYAMNWVRQAPGKGLEWVARIRSKYNNYATYYADSVKDRFTISRDDSKSSLYLQMNNLKTEDTAMYYCVRHGNFGNSYVRWFAYWGQGTLVTVSS

SEQ ID NO: 925 - protein, 125 aa, Synthetic construct
EVKLVESGGGLVQPGGSLRLSCAASGFTFNTYAMNWVRQAPGKGLEWVARIRSKYNNYATYYADSVKDRFTISRDDSKSSLYLQMNNLKTEDTAMYYCVRHGNFGNSYVTWFAYWGQGTLVTVSS

SEQ ID NO: 926 - protein, 125 aa, Synthetic construct
EVKLVESGGGLVQPGGSLRLSCAASGFTFNTYAMNWVRQAPGKGLEWVARIRSKYNNYATYYADSVKDRFTISRDDSKSSLYLQMNNLKTEDTAMYYCVRHGNFGNSYVWWFAYWGQGTLVTVSS

SEQ ID NO: 927 - protein, 125 aa, Synthetic construct
EVKLVESGGGLVQPGGSLRLSCAASGFTFNTYAMNWVRQAPGKGLEWVARIRSKYNNYATYYADSVKDRFTISRDDSKSSLYLQMNNLKTEDTAMYYCVRHGNFGNSYVYWFAYWGQGTLVTVSS

SEQ ID NO: 928 - protein, 125 aa, Synthetic construct
EVKLVESGGGLVQPGGSLRLSCAASGFTFNTYAMNWVRQAPGKGLEWVARIRSKYNNYATYYADSVKDRFTISRDDSKSSLYLQMNNLKTEDTAMYYCVRHGNFGNSYVSWFAAWGQGTLVTVSS

SEQ ID NO: 929 - protein, 125 aa, Synthetic construct
EVKLVESGGGLVQPGGSLRLSCAASGFTFNTYAMNWVRQAPGKGLEWVARIRSKYNNYATYYADSVKDRFTISRDDSKSSLYLQMNNLKTEDTAMYYCVRHGNFGNSYVSWFACWGQGTLVTVSS

SEQ ID NO: 930 - protein, 125 aa, Synthetic construct
EVKLVESGGGLVQPGGSLRLSCAASGFTFNTYAMNWVRQAPGKGLEWVARIRSKYNNYATYYADSVKDRFTISRDDSKSSLYLQMNNLKTEDTAMYYCVRHGNFGNSYVSWFAEWGQGTLVTVSS

SEQ ID NO: 931 - protein, 125 aa, Synthetic construct
EVKLVESGGGLVQPGGSLRLSCAASGFTFNTYAMNWVRQAPGKGLEWVARIRSKYNNYATYYADSVKDRFTISRDDSKSSLYLQMNNLKTEDTAMYYCVRHGNFGNSYVSWFAFWGQGTLVTVSS

SEQ ID NO: 932 - protein, 125 aa, Synthetic construct
EVKLVESGGGLVQPGGSLRLSCAASGFTFNTYAMNWVRQAPGKGLEWVARIRSKYNNYATYYADSVKDRFTISRDDSKSSLYLQMNNLKTEDTAMYYCVRHGNFGNSYVSWFAGWGQGTLVTVSS

SEQ ID NO: 933 - protein, 125 aa, Synthetic construct
EVKLVESGGGLVQPGGSLRLSCAASGFTFNTYAMNWVRQAPGKGLEWVARIRSKYNNYATYYADSVKDRFTISRDDSKSSLYLQMNNLKTEDTAMYYCVRHGNFGNSYVSWFAHWGQGTLVTVSS

SEQ ID NO: 934 - protein, 125 aa, Synthetic construct
EVKLVESGGGLVQPGGSLRLSCAASGFTFNTYAMNWVRQAPGKGLEWVARIRSKYNNYATYYADSVKDRFTISRDDSKSSLYLQMNNLKTEDTAMYYCVRHGNFGNSYVSWFAIWGQGTLVTVSS

SEQ ID NO: 935 - protein, 125 aa, Synthetic construct
EVKLVESGGGLVQPGGSLRLSCAASGFTFNTYAMNWVRQAPGKGLEWVARIRSKYNNYATYYADSVKDRFTISRDDSKSSLYLQMNNLKTEDTAMYYCVRHGNFGNSYVSWFAKWGQGTLVTVSS

SEQ ID NO: 936 - protein, 125 aa, Synthetic construct
EVKLVESGGGLVQPGGSLRLSCAASGFTFNTYAMNWVRQAPGKGLEWVARIRSKYNNYATYYADSVKDRFTISRDDSKSSLYLQMNNLKTEDTAMYYCVRHGNFGNSYVSWFALWGQGTLVTVSS

SEQ ID NO: 937 - protein, 125 aa, Synthetic construct
EVKLVESGGGLVQPGGSLRLSCAASGFTFNTYAMNWVRQAPGKGLEWVARIRSKYNNYATYYADSVKDRFTISRDDSKSSLYLQMNNLKTEDTAMYYCVRHGNFGNSYVSWFANWGQGTLVTVSS

SEQ ID NO: 938 - protein, 125 aa, Synthetic construct
EVKLVESGGGLVQPGGSLRLSCAASGFTFNTYAMNWVRQAPGKGLEWVARIRSKYNNYATYYADSVKDRFTISRDDSKSSLYLQMNNLKTEDTAMYYCVRHGNFGNSYVSWFAPWGQGTLVTVSS

SEQ ID NO: 939 - protein, 125 aa, Synthetic construct
EVKLVESGGGLVQPGGSLRLSCAASGFTFNTYAMNWVRQAPGKGLEWVARIRSKYNNYATYYADSVKDRFTISRDDSKSSLYLQMNNLKTEDTAMYYCVRHGNFGNSYVSWFAQWGQGTLVTVSS

SEQ ID NO: 940 - protein, 125 aa, Synthetic construct
EVKLVESGGGLVQPGGSLRLSCAASGFTFNTYAMNWVRQAPGKGLEWVARIRSKYNNYATYYADSVKDRFTISRDDSKSSLYLQMNNLKTEDTAMYYCVRHGNFGNSYVSWFASWGQGTLVTVSS

SEQ ID NO: 941 - protein, 125 aa, Synthetic construct
EVKLVESGGGLVQPGGSLRLSCAASGFTFNTYAMNWVRQAPGKGLEWVARIRSKYNNYATYYADSVKDRFTISRDDSKSSLYLQMNNLKTEDTAMYYCVRHGNFGNSYVSWFATWGQGTLVTVSS

SEQ ID NO: 942 - protein, 125 aa, Synthetic construct
EVKLVESGGGLVQPGGSLRLSCAASGFTFNTYAMNWVRQAPGKGLEWVARIRSKYNNYATYYADSVKDRFTISRDDSKSSLYLQMNNLKTEDTAMYYCVRHGNFGNSYVSWFAWWGQGTLVTVSS

SEQ ID NO: 943 - protein, 121 aa, Synthetic construct
EVQLVESGGGLVQPGGSLKLSCAASGFTFSGSAMHWVRQASGKGLEWVGRIRSKANSYATAYAASVKGRFTISRDDSKNTAYLQMNSLKTEDTAVYYCTSGIADSSGYDYWGQGTLVTVSS

SEQ ID NO: 944 - protein, 121 aa, Synthetic construct
EVQLVESGGGLVQPGGSLKLSCAASGFTFSGSAMHWVRQASGKGLEWVGRIRSKANSYATAYAASVKGRFTISRDDSKNTAYLQMNSLKTEDTAVYYCTSGIYASSGYDYWGQGTLVTVSS

SEQ ID NO: 945 - protein, 121 aa, Synthetic construct
EVQLVESGGGLVQPGGSLKLSCAASGFTFSGSAMHWVRQASGKGLEWVGRIRSKANSYATAYAASVKGRFTISRDDSKNTAYLQMNSLKTEDTAVYYCTSGIYDSSGADYWGQGTLVTVSS

SEQ ID NO: 946 - protein, 121 aa, Synthetic construct
EVQLVESGGGLVQPGGSLKLSCAASGFTFSGSAMHWVRQASGKGLEWVGRIRSKANSYATAYAASVKGRFTISRDDSKNTAYLQMNSLKTEDTAVYYCTSGIYDSSGYAYWGQGTLVTVSS

SEQ ID NO: 947 - protein, 126 aa, Synthetic construct
EVQLVESGGGLVQPGGSLKLSCAASGFTFNKYAMNWVRQAPGKGLEWVARIRSKYDYKDDDDKADSVKDRFTISRDDSKNTAYLQMNNLKTEDTAVYYCVRHGNFGNSYISYWAYWGQGTLVTVSS

SEQ ID NO: 948 - protein, 125 aa, Synthetic construct
EVQLVESGGGLVQPGGSLKLSCAASGFTFNKHAMNWVRQAPGKGLEWVARIRSKYNNYATAYADSVKDRFTISRDDSKNTAYLQMNNLKTEDTAVYYCVRHGNFGNSYISYWAYWGQGTLVTVSS

SEQ ID NO: 949 - protein, 123 aa, Synthetic construct
EVQLEVQLEVQLVESGGGLVQPGNSLRLSCAASGFTFSKFGMSWVRQAPGKGLEWVSSISGSGRDTLYAESVKGRFTISRDNAKTTLYLQMNSLRPEDTAVYYCTIGGSLSVSSQGTLVTVSS

SEQ ID NO: 950 - protein, 127 aa, Synthetic construct
EVQLEVQLEVQLEVQLVESGGGLVQPGNSLRLSCAASGFTFSKFGMSWVRQAPGKGLEWVSSISGSGRDTLYAESVKGRFTISRDNAKTTLYLQMNSLRPEDTAVYYCTIGGSLSVSSQGTLVTVSS

SEQ ID NO: 951 - protein, 134 aa, Synthetic construct
EVQLEVQLEVQLVESGGGLVQPGGSLKLSCAASGFTFNKYAMNWVRQAPGKGLEWVARIRSKYDYKDDDDKADSVKDRFTISRDDSKNTAYLQMNNLKTEDTAVYYCVRHGNFGNSYISYWAYWGQGTLVTVSS

SEQ ID NO: 952 - protein, 138 aa, Synthetic construct
EVQLEVQLEVQLEVQLVESGGGLVQPGGSLKLSCAASGFTFNKYAMNWVRQAPGKGLEWVARIRSKYDYKDDDDKADSVKDRFTISRDDSKNTAYLQMNNLKTEDTAVYYCVRHGNFGNSYISYWAYWGQGTLVTVSS

SEQ ID NO: 953 - protein, 119 aa, Synthetic construct
EVQLEVQLVESGGGLVQPGNSLRLSCAASGFTFSKFGMSWVRQAPGKGLEWVSSISGSGRDTLYAESVKGRFTISRDNAKTTLYLQMNSLRPEDTAVYYCTIGGSLSVSSQGTLVTVSS

SEQ ID NO: 954 - protein, 131 aa, Synthetic construct
EVQLEVQLEVQLEVQLEVQLVESGGGLVQPGNSLRLSCAASGFTFSKFGMSWVRQAPGKGLEWVSSISGSGRDTLYAESVKGRFTISRDNAKTTLYLQMNSLRPEDTAVYYCTIGGSLSVSSQGTLVTVSS

SEQ ID NO: 955 - protein, 125 aa, Synthetic construct
EVQLLESGGGLVQPGGSLKLSCAASGFTFNTYAMNWVRQAPGKGLEWVARIRSKYNNYATYYADSVKDRFTISRDDSKNTAYLQMNNLKTEDTAVYYCVRHGNFGNSYVSWFAYWGQGTLVTVSS

SEQ ID NO: 956 - protein, 119 aa, Synthetic construct
EVQLVESGGGLVQPKGSLSLSCAASGFTFNTYAMNWVRQAPGKGLEWVARIRSKSNNYATYYADSVKDRFTISRDDSQSMLYLQMTNLKTEDTAMYHCVRSLGRAFVYWGQGTLVTVSS

SEQ ID NO: 957 - protein, 118 aa, Synthetic construct
EVKLVETGGGLVQPKGSLKLSCAASGFNFNTYAMNWVRQAPGKGLEWVARIRSKSNNYATYYADSVKDRFTISRDDSENMLYLQMNNLKTEDTAIYYCVRGGGNLDYWGQGTTLTVSS

SEQ ID NO: 958 - protein, 124 aa, Synthetic construct
EVQLVESGGGLVQPGGSLRLSCAASGFTFSSYAMSWVRQAPGKGLEWVSAISGSGGRTYYADSVKGRFTISRDNSKNTLYLQMNSLRAEDTAMYYCARGPGYMYLYGDSFFEYWGQGTLVTVSS

SEQ ID NO: 959 - protein, 116 aa, Synthetic construct
EVQLEVQLQESGPGLVKPSQSLSLTCSVTGYSITSGYYWNWIRQFPGNKLEWMGYITYDGSNNYNPSLKNRISITRDTSKNQFFLKLNSVTTEDTATYYCADFDYWGQGTTLTVSS

SEQ ID NO: 960 - protein, 129 aa, Synthetic construct
EVQLEVQLVESGGGLVQPKGSLKLSCAASGFTFNTYAMNWVRQAPGKGLEWVARIRSKYNNYATYYADSVKDRFTISRDDSQSILYLQMNNLKTEDTAMYYCVRHGNFGNSYVSWFAYWGQGTLVTVSA

SEQ ID NO: 961 - protein, 125 aa, Synthetic construct
EVQLVESGGGLVKPGGSLRLSCAASGFTFNTYAMNWVRQAPGKGLEWVGRIRSKYNNYATYYADSVKDRFTISRDDSKNTLYLQMNSLKTEDTAVYYCTTHGNFGNSYVSWFAYWGQGTLVTVSS

SEQ ID NO: 962 - protein, 125 aa, Synthetic construct
QVQLVESGGGLVKPGGSLRLSCAASGFTFNTYAMNWIRQAPGKGLEWVSRIRSKYNNYATYYADSVKDRFTISRDNAKNSLYLQMNSLRAEDTAVYYCVRHGNFGNSYVSWFAYWGQGTLVTVSS

SEQ ID NO: 963 - protein, 120 aa, Synthetic construct
QVQLVESGGGLVQPGGSLRLSCAASGFNIKDTYIHWVRQAPGKGLEWVARIYPTNGYTRYADSVKGRFTISADTSKNTAYLQMNSLRAEDTAVYYCSRWGGDGFYAMDYWGQGTLVTVSS

SEQ ID NO: 964 - protein, 122 aa, Synthetic construct
EVQLVESGGGLVQPGGSLRLSCAASGFTFSDYYMDWVRQAPGKGLEWVGGIRNKPNSYTTEYAASVKGRFTISRDDSKNSLFLQMNSLKTEDTAVYYCVRLYGDYVAYFDYWGQGTLVTVSS

SEQ ID NO: 965 - protein, 119 aa, Synthetic construct
EVQLQESGGGLVQPKGSLKLSCAAFGFTFNTYAMHWVRQAPGKGLEWVARIRSKSNNYATYYADSVKDRFTISRDDSQSMLSLQMNNLKTEDTAIYYCVRGGYWSFDVWGAGTTVTVSS

SEQ ID NO: 966 - protein, 119 aa, Synthetic construct
EVQLVESGGGLVKPGGSLRLSCAASGFTFSSYAMDWVRQAPGKGLEWVGRIKSKADSYTADYAAPVKGRFTISRDDSKNTLYLQMNSLKTEDTAVYYCARSHYSAFAYWGQGTLVTVSS

SEQ ID NO: 967 - protein, 118 aa, Synthetic construct
EVQLVESGGGLVQPKGSLKLSCAASGFTFNTYAMNWVRQAPGKGLEWVARIRSKSDNYATYYADSVKDRFTISRDDSQSMLYLQMNNLKTEDTAMYYCMRGITTVNVWGAGTTVTVSS

SEQ ID NO: 968 - protein, 124 aa, Synthetic construct
EVQLVESGGGLVQPGGSLRLSCAASGFTFSTYAMNWVRQAPGKGLEWVGRIRSKYNNYATYYADSVKDRFISRDDSKNSLYLQMNSLKTEDTAVYYCVRHGNFGNSYVSWFAYWGQGTLVTVSS

SEQ ID NO: 969 - protein, 124 aa, Synthetic construct
EVQLVESGGGLVQPGGSLRLSCAASGFTFNTYAMNWVRQAPGKGLEWVARIRSKYNNYATYYADSVKDRFISRDDSKNSLYLQMNSLKTEDTAVYYCVRHGNFGNSYVSWFAYWGQGTLVTVSS

SEQ ID NO: 970 - protein, 120 aa, Synthetic construct
  VARIANT 22: note = X can be any amino acid
  VARIANT 98: note = X can be any amino acid
EVQLVQSGGGLVQPKGSLKLSXAASGFNFNTYAMHWVRQAPGKGLEWIGRIRSKSHNYATDYADPVKDRFTISRDDSQGLLYLLMNNLKTEDTAMYYXMREGIYGSFAYWGQGTLVTVSA

SEQ ID NO: 971 - protein, 122 aa, Synthetic construct
  VARIANT 22: note = X can be any amino acid
  VARIANT 98: note = X can be any amino acid
EVQLVESGGGLVQPGGSLRLSXVASGFTFSNYWMNWVRQAPGKGLEWVAEIRLKSNNYATHYAESVKGRFTISRDDSKNTVYLQMNSLRAEDTAVYYXTRNGNYVDYAMDYWGQGTLVTVSS

SEQ ID NO: 972 - protein, 117 aa, Synthetic construct
  VARIANT 22: note = X can be any amino acid
  VARIANT 98: note = X can be any amino acid
EVQLVESGGGLVKPGGSLRLSXAASGFTFSAYAMNWVRQAPGKGLEWVGRIRTKNNNYATYYADSVKDRFTISRDDSKNTLYLQMNSLKTEDTAVYYXTTFYGNGVWGQGTLVTVSS

SEQ ID NO: 973 - protein, 125 aa, Synthetic construct
EVQLVESGGGLVQPGGSLKLSCAASGFTFNTYAMNWVRQASGKGLEWVGRIRSKYNNYATYYADSVKDRFTISRDDSKNTAYLQMNSLKTEDTAVYYCVRHGNFGNSYVSWFAYWGQGTLVTVSS

SEQ ID NO: 974 - protein, 125 aa, Synthetic construct
EVQLVESGGGLVQPGGSLKLSCAASGFTFNTYAMNWVRQASGKGLEWVGRIRSKYNNYATYYADSVKDRFTISRDDSKNTLYLQMNSLKTEDTAVYYCVRHGNFGNSYVSWFAYWGQGTLVTVSS

SEQ ID NO: 975 - protein, 125 aa, Synthetic construct
EVQLVESGGGLVQPGGSLKLSCAASGFTFNTYAMNWVRQASGKGLEWVGRIRSKYNNYATYYADSVKDRFTISRDDSQSTAYLQMNSLKTEDTAVYYCVRHGNFGNSYVSWFAYWGQGTLVTVSS

SEQ ID NO: 976 - protein, 125 aa, Synthetic construct
EVQLVESGGGLVQPGGSLKLSCAASGFTFNTYAMNWVRQASGKGLEWVGRIRSKYNNYATYYADSVKDRFTISRDDSQSTLYLQMNSLKTEDTAVYYCVRHGNFGNSYVSWFAYWGQGTLVTVSS

SEQ ID NO: 977 - protein, 125 aa, Synthetic construct
EVQLVESGGGLVQPGGSLKLSCAASGFTFNTYAMNWVRQASGKGLEWVARIRSKYNNYATYYADSVKDRFTISRDDSKNTAYLQMNSLKTEDTAVYYCVRHGNFGNSYVSWFAYWGQGTLVTVSS

SEQ ID NO: 978 - protein, 125 aa, Synthetic construct
EVQLVESGGGLVQPGGSLKLSCAASGFTFNTYAMNWVRQASGKGLEWVARIRSKYNNYATYYADSVKDRFTISRDDSKNTLYLQMNSLKTEDTAVYYCVRHGNFGNSYVSWFAYWGQGTLVTVSS

SEQ ID NO: 979 - protein, 125 aa, Synthetic construct
EVQLVESGGGLVQPGGSLKLSCAASGFTFNTYAMNWVRQASGKGLEWVARIRSKYNNYATYYADSVKDRFTISRDDSQSTAYLQMNSLKTEDTAVYYCVRHGNFGNSYVSWFAYWGQGTLVTVSS

SEQ ID NO: 980 - protein, 125 aa, Synthetic construct
EVQLVESGGGLVQPGGSLKLSCAASGFTFNTYAMNWVRQASGKGLEWVARIRSKYNNYATYYADSVKDRFTISRDDSQSTLYLQMNSLKTEDTAVYYCVRHGNFGNSYVSWFAYWGQGTLVTVSS

SEQ ID NO: 981 - protein, 129 aa, Synthetic construct
EVQLEVQLVESGGGLVQPGGSLKLSCAASGFTFNTYAMNWVRQAPGKGLEWVARIRSKYNNYATYYADSVKDRFTISRDDSKNTAYLQMNNLKTEDTAVYYCVRHGNFGNSYVSWFAYWGQGTLVTVSS

SEQ ID NO: 982 - protein, 125 aa, Synthetic construct
EVQLLESGGGLVQPGGSLRLSCAASGFTFNTYAMNWVRQAPGKGLEWVARIRSKYNNYATYYADSVKDRFTISRDDSKSTLYLQMNSLRAEDTAVYYCVRHGNFGNSYVSWFAYWGQGTLVTVSS

SEQ ID NO: 983 - protein, 125 aa, Synthetic construct
EVQLLESGGGLVQPGGSLRLSCAASGFTFDTYAMNWVRQAPGKGLEWVARIRSKYNNYATYYADSVKDRFTISRDDSKSTLYLQMNSLRAEDTAVYYCVRHGNFGNGYVSWFAHWGQGTLVTVSS

SEQ ID NO: 984 - protein, 125 aa, Synthetic construct
EVQLLESGGGLVQPGGSLRLSCAASGFTFNTYAMNWVRQAPGKGLEWVARIRSKYNNYATYYADSVKDRFTISRDDSKSTLYLQMNSLRAEDTAVYYCVRHSNFGNGYVSWFAYWGQGTLVTVSS

SEQ ID NO: 985 - protein, 125 aa, Synthetic construct
EVQLLESGGGLVQPGGSLRLSCAASGFTFDTYAMNWVRQAPGKGLEWVARIRSKYNNYATYYADSVKGRFTISRDDSKSTLYLQVNSLRAEDTAVYYCVRHGNFGNSYVSWFAHWGQGTLVTVSS

SEQ ID NO: 986 - protein, 125 aa, Synthetic construct
EVQLLESGGGLVQPGGSLRLSCAASGFTFDTYAMNWVRQAPGKGLEWVARIRSKYNNYATYYADSVKDRFTISRDDSKSTLYLQMNSLRAEDTAVYYCVRHGNFGNSYVSWFAHWGQGTLVTVSS

SEQ ID NO: 987 - protein, 125 aa, Synthetic construct
EVQLLESGGGLVQPGGSLRLSCAASGFTFDTYAMNWVRQAPGKGLEWVARIRSKYNNYATYYADSVKDRFTISRDDSKSTLYLQINSLRAEDTAVYYCVRHGNFGNSYVSWFAHWGQGALVTVSS

SEQ ID NO: 988 - protein, 125 aa, Synthetic construct
EVQLLESGGGLVQPGGSLRLSCAASGFTFDTYAMNWVRQAPGKGLEWVARIRSKYNNYATYYADSVKDRFAISRDDSKSTLYLQMNSLRAEDTAVYYCVRHSNFGNSYVSWFAHWGQGTLVTVSS

SEQ ID NO: 989 - protein, 125 aa, Synthetic construct
EVQLLESGGGLVQPGGSLRLSCAASGFTSATYAMNWVRQAPGKGLEWVARIRSKYNNYATYYADSVKDRFTISRDDSKSTLYLQMNSLRAEDTAVYYCVRHGNFGNSHVSWFAHWGQGTLVTVSS

SEQ ID NO: 990 - protein, 125 aa, Synthetic construct
EVQLLESGGGLVQPGGSLRLSCAASGFTFNTYAMNWVRQAPGKGLEWVARIRSKYNNYATYYADSVKDRFTISRDDSKNTLYLQMNSLRAEDTAVYYCVRHGNFGNSYVSWFASWGQGTLVTVSS

SEQ ID NO: 991 - protein, 125 aa, Synthetic construct
EVQLLESGGGLVQPGGSLRLSCAASGFTFDAYAMNWVRQAPGKGLEWVARIRSKYNDYATYYADSVKDRFTISRDDSKSTLYLQMNSLRAEDTAVYYCVRHGNFGNGYVSWFAHWGQGTLVTVSS

SEQ ID NO: 992 - protein, 125 aa, Synthetic construct
EVQLLESGGGLVQPGGSLRLSCAASGFTFDTYAMNWVRQAPGKGLEWVARIRSKYNNYATYYADSVKDRFTISRDDSKSTLYLQMESLRAEDTAVYYCVRHGNFGNGYVSWFAHWGQGTLVTVSS

SEQ ID NO: 993 - protein, 125 aa, Synthetic construct
EVQLLESGGGLVQPGGSLRLSCAASGFTFDTYAMNWVRQAPGKGLEWVARIRSKYNNYATYYADSVKDRFTISRDDSKSTLYLQMNSLRAEDTAVYYCVRHGNFGEGYVSWFAHWGQGTLVTVSS

SEQ ID NO: 994 - protein, 125 aa, Synthetic construct
EVQLLESGGGLVQPGGSLRLSCAASGFTFDTYAMNWVRQAPGKGLEWVARIRSKYNNYATYYADSVKDRFTISRDDSKSTLYLQMESLRAEDTAVYYCVRHGNFGEGYVSWFAHWGQGTLVTVSS

SEQ ID NO: 995 - protein, 125 aa, Synthetic construct
EVQLLESGGGLVQPGGSLRLSCAASGFTFDTYAMNWVRQAPGKGLEWVARIRSKYNNYATYYADSVKDRFTISRDDSKSTLYLQMNALRAEDTAVYYCVRHGNFGNGYVSWFAHWGQGTLVTVSS

SEQ ID NO: 996 - protein, 125 aa, Synthetic construct
EVQLLESGGGLVQPGGSLRLSCAASGFTFDTYAMNWVRQAPGKGLEWVARIRSKYNNYATYYADSVKDRFTISRDDSKSTLYLQMNSLRAEDTAVYYCVRHGNFGNAYVSWFAHWGQGTLVTVSS

SEQ ID NO: 997 - protein, 125 aa, Synthetic construct
EVQLLESGGGLVQPGGSLRLSCAASGFTFDTYAMNWVRQAPGKGLEWVARIRSKYNNYATYYADSVKDRFTISRDDSKSTLYLQMNALRAEDTAVYYCVRHGNFGNAYVSWFAHWGQGTLVTVSS

SEQ ID NO: 998 - protein, 125 aa, Synthetic construct
EVQLLESGGGLVQPGGSLRLSCAASGFTFDTYAMNWVRQAPGKGLEWVARIRSKYNNYATYYSYSVKDRFTISRDDSKSTLYLQMNSLRAEDTAVYYCVRHGNFGNGYVSWFAHWGQGTLVTVSS

SEQ ID NO: 999 - protein, 125 aa, Synthetic construct
EVQLLESGGGLVQPGGSLRLSCAASGFTFDTYAMNWVRQAPGKCLEWVARIRSKYNNYATYYADSVKDRFTISRDDSKSTLYLQMNSLRAEDTAVYYCVRHGNFGNGYVSWFAHWGQGTLVTVSS

SEQ ID NO: 1000 - protein, 125 aa, Synthetic construct
EVQLLESGGGLVQPGGSLRLSCAASGFTFDTYAMNWVRQAPGGCLEWVARIRSKYNNYATYYADSVKDRFTISRDDSKSTLYLQMNSLRAEDTAVYYCVRHGNFGNGYVSWFAHWGQGTLVTVSS

SEQ ID NO: 1001 - protein, 125 aa, Synthetic construct
EVQLLESGGGLVQPGGSLRLSCAASGFTFDTYAMNWVRQAPGKGLEWVARIRSKYNNYATYYADSVKDRFTISRDDSKSTLYLQMESLRAEDTAVYYCVRHGNFQGGYVSWFAHWGQGTLVTVSS

SEQ ID NO: 1002 - protein, 125 aa, Synthetic construct
EVQLLESGGGLVQPGGSLRLSCAASGFTFDTYAMNWVRQAPGKGLEWVARIRSKYNNYATYYADSVKDRFTISRDDSKSTLYLQMESLRAEDTAVYYCVRHGNFGGGYVSWFAWWGQGTLVTVSS

SEQ ID NO: 1003 - protein, 125 aa, Synthetic construct
EVQLLESGGGLVQPGGSLRLSCAASGFTFDTYAMNWVRQAPGKGLEWVARIRSKYNNYATYYADSVKDRFTISRDDSKSTLYLQMESLRAEDTAVYYCVRHANFGAGYVSWFAHWGQGTLVTVSS

SEQ ID NO: 1004 - protein, 125 aa, Synthetic construct
EVQLLESGGGLVQPGGSLRLSCAASGFTFDTYAMNWVRQAPGKGLEWVARIRSKYNNYATYYADSVKDRFTISRDDSKSTLYLQMESLRAEDTAVYYCVRHDNFGAGYVSWFAHWGQGTLVTVSS

SEQ ID NO: 1005 - protein, 125 aa, Synthetic construct
EVQLLESGGGLVQPGGSLRLSCAASGFTFDTYAMNWVRQAPGKGLEWVARIRSKYNNYATYYADSVKDRFTISRDDSKSTLYLQMESLRAEDTAVYYCVRHGNFGVGYVSWFASWGQGTLVTVSS

SEQ ID NO: 1006 - protein, 125 aa, Synthetic construct
EVQLLESGGGLVQPGGSLRLSCAASGFTFDTYAMNWVRQAPGKGLEWVARIRSKYNDYATYYADSVKDRFTISRDDSKSTLYLQMESLRAEDTAVYYCVRHGNFGEGYVSWFAHWGQGTLVTVSS

SEQ ID NO: 1007 - protein, 125 aa, Synthetic construct
EVQLLESGGGLVQPGGSLRLSCAASGFTFDTYAMNWVRQAPGKGLEWVARIRSKYNDYATYYADSVKDRFTISRDDSKSTLYLQMESLRAEDTAVYYCVRHDNFGAGYVSWFAHWGQGTLVTVSS

SEQ ID NO: 1008 - protein, 125 aa, Synthetic construct
EVQLLESGGGLVQPGGSLRLSCAASGFTFDTYAMNWVRQAPGKGLEWVARIRSKYNDYATYYADSVKDRFTISRDDSKSTLYLQMESLRAEDTAVYYCVRHGNFGVGYVSWFASWGQGTLVTVSS

SEQ ID NO: 1009 - protein, 125 aa, Synthetic construct
EVQLLESGGGLVQPGGSLRLSCAASGFTFDTYAMNWVRQAPGKGLEWVARIRSKYNDYATYYADSVKDRFTISRDDSKSTLYLQMESLRAEDTAVYYCVRHGNFGGAYVSWFAHWGQGTLVTVSS

SEQ ID NO: 1010 - protein, 125 aa, Synthetic construct
EVQLLESGGGLVQPGGSLRLSCAASGFTFDAYAMNWVRQAPGKGLEWVARIRSKYNDYATYYADSVKDRFTISRDDSKSTLYLQMESLRAEDTAVYYCVRHGNFGGGYVSWFGHWGQGTLVTVSS

SEQ ID NO: 1011 - protein, 125 aa, Synthetic construct
EVQLLESGGGLVQPGGSLRLSCAASGFTFDAYAMNWVRQAPGKGLEWVARIRSKYNDYATYYADSVKDRFTISRDDSKSTLYLQMESLRAEDTAVYYCVRHGNFGNYAVSWFAHWGQGTLVTVSS

SEQ ID NO: 1012 - protein, 125 aa, Synthetic construct
EVQLLESGGGLVQPGGSLRLSCAASGFTFDTYAMNWVRQAPGKGLEWVARIRSKYNNYATYYADSVKDRFTISRDDSKSTLYLQMESLRAEDTAVYYCVRHGNFGGAYVSWFAHWGQGTLVTVSS

SEQ ID NO: 1013 - protein, 125 aa, Synthetic construct
EVQLLESGGGLVQPGGSLRLSCAASGFTFDAYAMNWVRQAPGKGLEWVARIRSKYNDYATYYADSVKDRFTISRDDSKSTLYLQMESLRAEDTAVYYCVRHGNVGGGYVSWFAHWGQGTLVTVSS

SEQ ID NO: 1014 - protein, 125 aa, Synthetic construct
EVQLLESGGGLVQPGGSLRLSCAASGFTFDTYAMNWVRQAPGKGLEWVARIRSKYNNYATYYADSVKDRFTISRDDSKSKLYLQMESLRAEDTAVYYCVRHGNFGGGYVSWFAHWGQGTLVTVSS

SEQ ID NO: 1015 - protein, 125 aa, Synthetic construct
EVQLLGSGGGLVQPGGSLRLSCAASGFTFDTYAMNWVRQAPGKGLEWVARIRSKYNNYATYYADSVKDRFTISRDDSKSTLYLQMESLRAEDTAVYYCVRHGNFGNSYVSWFAHWGQGTLVTVSS

SEQ ID NO: 1016 - protein, 125 aa, Synthetic construct
EVQLLESGGGLVQPGGSLRLSCAASGFTFDTYAMNWVRQAPGKGLEWVARIRSKYNNYATYYADSVKDRFTISRDDSKSTLYLQMESLRAEDTAVYYCVRHGNFGGGYVAWFAHWGQGTLVTVSS

SEQ ID NO: 1017 - protein, 125 aa, Synthetic construct
EVQLLESGGGLVQPGGSLRLSCAASGFTFDTYAMNWVRQAPGKGLEWVARIRSKFNNYATYYADSVKDRFTISRDDSKSTLYLQMESLRAEDTAVYYCVRHGNFQGGYVSWFAHWGQGTLVTVSS

SEQ ID NO: 1018 - protein, 125 aa, Synthetic construct
EVQLLESGGGLVQPGGSLRLSCAASGFTFDTYAMNWVRQAPGKGLEWVARIRSKYNNYATYYADSVKDRFTISRDDSKSTLYLQMESLRAEDTAVYYCVRHGNVGGGYVSWFAHWGQGTLVTVSS

SEQ ID NO: 1019 - protein, 125 aa, Synthetic construct
EVQLLESGGGLVQPGGSLRLSCAASGFTFDTYAMNWVRQAPGKGLEWVARIRSKYNNYATYYADSVKDRFTISRDDSKSTLYLQMESLRAEDTAVYYCVRHGNFGNYAVSWFAHWGQGTLVTVSS

SEQ ID NO: 1020 - protein, 125 aa, Synthetic construct
EVQLLESGGGLVQPGGSLRLSCAASGFTFDTYAMNWVRQAPGKGLEWVARIRSKYNNYATYYADSVKDRFTISRDDSKSTLYLQMESLRAEDTAVYYCVRHGSFGNHIVSWFAHWGQGTLVTVSS

SEQ ID NO: 1021 - protein, 125 aa, Synthetic construct
EVQLLESGGGLVQPGGSLRLSCAASGFTFNTYAMNWVRQAPGKGLEWVSRIRSKYNNYATYYADSVKDRFTISRDNSKNTLYLQMNSLRAEDTAVYYCVRHGNFGNSYVSWFAYWGQGTLVTVSS

SEQ ID NO: 1022 - protein, 125 aa, Synthetic construct
EVQLLESGGGLVQPGGSLRLSCAASGFTFNTYAMNWVRQAPGKGLEWVARIRSKYNNYATYYADSVKDRFTISRDDSKSTLYLQMNSLRAEDTAVYYCVRHDNFRNSYVSWFAYWGQGTLVTVSS

SEQ ID NO: 1023 - protein, 125 aa, Synthetic construct
EVQLLESGGGLVQPGGSLRLSCAASGFTFNTYAMNWVRQAPGKGLEWVARIRSKYNNYATYYADSVKDRFTISRDDSKSTLYLQMNSLRAEDTAVYYCVRHGNFGNSHVSWFAYWGQGTLVTVSS

SEQ ID NO: 1024 - protein, 125 aa, Synthetic construct
EVQLVESGGGLVQPGGSLRLSCAASGFTFNTYAMNWVRQAPGKGLEWVARIRSKYNDYATYYADSVKDRFTISRDDSKSTLYLQMNSLRAEDTAVYYCVRHGNFGNSHVSWFAYWGQGTLVTVSS

SEQ ID NO: 1025 - protein, 125 aa, Synthetic construct
EVQLLESGGGLVQPGGSLRLSCAASGFTFNTYAMNWVRQAPGKGLEWVARIRSKYNNYATYYADSVKDRFTISRDDSKSTLYLQMNSLRAEDTAVYYCVRHGNFGNSYVSWFAHWGQGTLVTVSS

SEQ ID NO: 1026 - protein, 125 aa, Synthetic construct
EVQLLESGGGLVQPGGSLRLSCAASGFTFDTYAMNWVRQAPGKGLEWVARIRSKYNNYATYYADSVKDRFTISRDDSKSTLYLQMNSLRAEDTAVYYCVRHGNFGNSYVSWFAYWGQGTLVTVSS

SEQ ID NO: 1027 - protein, 125 aa, Synthetic construct
EVQLSESGGGLVQPGGSLRLSCAASGFTFNTYAMNWVRQAPGKGLEWVARIRSKYNNYATYYADSVKDRFTISRDDSKSTLYLQMNSLRAEDTAVYYCVRHGNFGNSYVSWFAYWGQGTLVTVSS

SEQ ID NO: 1028 - protein, 125 aa, Synthetic construct
EVQLLESGGGLVQPGGSLRLSCAASGFTFNAYAMNWVRQAPGKGLEWVARIRSKYNNYATYYADSVKDRFTISRDDSKSTLYLQMNSLRAEDTAVYYCVRHGNFGNSYVSWFAYWGQGTLVTVSS

SEQ ID NO: 1029 - protein, 125 aa, Synthetic construct
EVQLLESGGGLVQPGGSLRLSCAASGFTFNTYAMNWVRQAPGKGLEWVARIRSKYNNYATYYADSVKDRFTISRDDSKSTLYLQMNSLRAEDTAVYYCVRHGNFGNSYISWFAYWGQGTLVTVSS

SEQ ID NO: 1030 - protein, 125 aa, Synthetic construct
EVQLSESGGGLVQPGGSLRLSCAASGFTFSTYAMNWVRQAPGKGLEWVARIRSKYNNYATYYADSVKDRFTISRDDSKSTLYLQMNSLRAEDTAVYYCVRHGNFGNSYVSWFAYWGQGTLVTVSS

SEQ ID NO: 1031 - protein, 125 aa, Synthetic construct
EVQLLESGGGLVQPGGSLRLSCAASGFTFNTYAMNWVRQAPGKGLEWVARIRSKYNNYATYYADSVKDRFTISRDDSKSTLYLQMNSLRAEDTAVYYCVRHSNFGNSYVSWFAYWGQGTLVTVSS

SEQ ID NO: 1032 - protein, 125 aa, Synthetic construct
EVQLLESGGGLVQPGGSLRLSCAASGFTFNTYAMNWVRQAPGKGLEWIARIRSKYNNYATYYADSVKDRFTISRDDSKSTLYLQMNSLRAEDTAVYYCVRHGNFGNSYVSWFAYWGQGTLVTVSS

SEQ ID NO: 1033 - protein, 125 aa, Synthetic construct
EVQLLESGGGLVQPGGSLRLSCAASGFTFNTYAMNWVRQAPGKGLEWVARIRSKYNNYATYYADSVKDRFTISRDDSKSTLYLQMDSLRAEDTAVYYCVRHGNFGNSYVSWFAYWGQGTLVTVSS

SEQ ID NO: 1034 - protein, 125 aa, Synthetic construct
EVQLLESGGGLVQPGGSLRLSCAASGFTFNTYAMNWVRQAPGKGLEWVARIRSKYNDYATYYADSVKDRFTISRDDSKSTLYLQMNSLRAEDTAVYYCVRHGNFGNSYVSWFAYWGQGTLVTVSS

SEQ ID NO: 1035 - protein, 125 aa, Synthetic construct
EVQLLESGGGLVQPGGSLRLSCAASGFTFDTYAMNWVRQAPGKGLEWVARIRSKYNNYATYYADSVKDRFTISRNDSKSTLYLQMNSLRAEDTAVYYCVRHGNFGNSYVSWFAYWGQGTLVTVSS

SEQ ID NO: 1036 - protein, 125 aa, Synthetic construct
EVQLLESGGGLVQPGGSLRLSCAASGFTFNTYAMNWVRQAPGKGLEWVARIRSKYNNYATYYADSVKDRFTISRDDSKSTLYLQMNSLRAEDTAVYYCVRHGNFGNSSVSWFAYWGQGTLVTVSS

SEQ ID NO: 1037 - protein, 118 aa, Synthetic construct
EVQLVESGGGLVQPGGSLRLSCAASGFTFSDFWMNWVRQAPGKGLEWVGQIRNKPNNYETYYSDSLKGRFTISRDDSKSITYLQMNSLRAEDTAVYYCTLGNSWFAYWGQGTLVTVSS

SEQ ID NO: 1038 - protein, 127 aa, Synthetic construct
EVQGVESGGGLVQPKGSLKLSCAASGFTFNTYAMHWVCQAPGKGLEWVARIRSKSNNYATYYADSVKDRFTISRDDSQSMLYLQMNNLKTEDTAMYYCVREGVYYYGSSGYYAMDYWGQGTSVTVSS

SEQ ID NO: 1039 - protein, 125 aa, Synthetic construct
EVQLVESGGGLVQPGGSLRLSCAASGFTFNTYAMNWVRQAPGKGLEWVARIRSKYNNYATYYADSVKGRFTISRDDSKNTLYLQMNSLRAEDTAVYYCARHGNFGSSYVSYFAYWGQGTTVTVSS

SEQ ID NO: 1040 - protein, 129 aa, Synthetic construct
EVQLEVQLVESGGGLVQPGGSLRLSCAASGFTFNTYAMNWVRQAPGKGLEWVARIRSKYNNYATYYADSVKGRFTISRDDSKNTLYLQMNSLRAEDTAVYYCARHGNFGSSYVSYFAYWGQGTTVTVSS

SEQ ID NO: 1041 - protein, 120 aa, Synthetic construct
EVQLVESGGGLVQPKGSLKLSCAASGFSFNTYAMNWVRQAPGKGLEWVARIRSKSNNYATYYADSVKDRFTISRDDSESMVYLQMNNLKTEDTAMYYCVRHGYYWYFDVWGTGTTVTVSS

SEQ ID NO: 1042 - protein, 121 aa, Synthetic construct
EVQLVESGGGLLQPKGSLKLSCAASGFTFNTYAMNWVRQAPGKGLEWVARIRSKSSNYATYYADSVKDRFTISRDDSQSMFYLEMNNLKTEDTAMYYCVRDRGYYYVMDYWGQGTSVTVSS

SEQ ID NO: 1043 - protein, 120 aa, Synthetic construct
EVQLVESGGGLVQPKGSLKLSCAASGFSFNTYAMNWVRQAPGKGLEWVARIRSKSNNYATYYADSVKDRFTIFRDDSESMLYLQMNNLKTEDTAMYYCVRHGYYWYFDVWGTGTTVTVSS

SEQ ID NO: 1044 - protein, 120 aa, Synthetic construct
AVQLVESGGGLVQPKGSLKLSCAASGFSFNTYAMNWVRQAPGKGLEWVARIRSKSNNYATYYADSVKDRFTLSRDDSESMLYLQMNNLKTEDTAMYYCVRQGFYWYFDVWGTGTTVTVSS

SEQ ID NO: 1045 - protein, 119 aa, Synthetic construct
EVQLVESGGGLVQPKGSLKLSCAASGFTFNTYAMHWVRQAPGKGLEWVARIRSKSSNYATYYADSVKDRFTISRDDSQSMLYLQMNNLKTEDTAMYYCVVDYLYAMDYWGQGTSVTVSS

SEQ ID NO: 1046 - protein, 125 aa, Synthetic construct
EVQLLESGGGLVQPGGSLRLSCAASGFQFSSYAMNWVRQAPGKGLEWVSRIRSKYNNYATYYADSVKGRFTISRDDSKNTLYLQMNSLRAEDTAVYYCVRHTTFPSSYVSYYGYWGQGTLVTVSS

SEQ ID NO: 1047 - protein, 117 aa, Synthetic construct
EVQLVESGGGLVKPGGSLRLSCAASGFTFSAYAMNWVRQAPGKGLEWVGRIRTKNNNYATYYADSVKDRFTISRDDSKNTLYLQMNSLKTEDTAVYYCTTFYGNGVWGQGTLVTVSS

SEQ ID NO: 1048 - protein, 123 aa, Synthetic construct
EVQLVESGGGLVQPGGSLKLSCAASGFTFNKYAMNWVRQAPGKGLEWVARIRSKYNNYATYYADSVKDRFTISRDDSKNTAYLQMNNLKTEDTAVYYCVRHGNFGNSYISYWAYWGQGTLVTV

SEQ ID NO: 1049 - protein, 128 aa, Synthetic construct
EVQLVESGGGLVQPGGSLKLSCAASGFTFSGSAMHWVRQASGKGLEWVGRIRSKANSYATTYAASVKGRFTISRDDSKNTAYLQMNSLKTEDTAVYYCTKPHAHCGGDCYSRDWFDPWGQGTLVTVSS

SEQ ID NO: 1050 - protein, 123 aa, Synthetic construct
EVQLVESGGGLVQPGGSLKLSCAASGFSFNTITMNWVRQASGKGLEWVGRIRSKSNNYATYYADAVKDRFTISRDDSKNTAYLQMNSLKTEDTAVYYCVRGIFSGYVYAMDYWGQGTLVTVSS

SEQ ID NO: 1051 - protein, 123 aa, Synthetic construct
EVLLVESGGRLVQPKGSLKLSCAASGFSFNTITMNWVRQAPGKGLEWVARIRSKSNNYATYYADAVKDRFTISRDDSQSMLYLQMNNLKTEDTAMYFCVRGIFSGYVYAMDYWGQGTTLTVSS

SEQ ID NO: 1052 - protein, 121 aa, Synthetic construct
EVQLVESGGGLVQPGGSLRLSCAASGFTFSRYWMNWVRQAPGKGLEWVGQIRLKSDNYETHYAESVKGRFTISRDDSKNSLYLQMNSLKTEDTAVYYCAREGGYYVPFAYWGQGTLVTVSS

SEQ ID NO: 1053 - protein, 121 aa, Synthetic construct
EVQLVESGGGLVQPGGSLRLSCAASGFTFSRYWMNWVRQAPGKGLEWVGQIRLKSDNYETHYAESVKGRFTISRDDSKNSLYLQMNSLKTEDTAVYYCIEEGGYYVPFAYWGQGTLVTVSS

SEQ ID NO: 1054 - protein, 121 aa, Synthetic construct
EVQLVESGGGLVQPGGSLRLSCAASGFTFSRYWMNWVRQAPGKGLEWVAQIRLKSDNYETHYAESVKGRFTISRDDSKSSLYLQMNSLKTEDTAVYYCIEEGGYYVPFAYWGQGTLVTVSS

SEQ ID NO: 1055 - protein, 125 aa, Synthetic construct
EVQLVESGGGLVQPGGSLRLSCAASGFTFSTYAMNWVRQAPGKGLEWVARIRSKYNNYATYYADSVKDRFTISRDNAKNSLYLQMNSLRAEDTAVYYCARHGNFGNSYVSWFAYWGQGTLVTVSS

SEQ ID NO: 1056 - protein, 125 aa, Synthetic construct
EVQLVESGGGLVQPGGSLRLSCAASGFTFSTYAMNWVRQAPGKGLEWVARIRSKYNNYATYYADSVKDRFTISRDDSKNSLYLQMNSLRAEDTAVYYCARHGNFGNSYVSWFAYWGQGTLVTVSS

SEQ ID NO: 1057 - protein, 125 aa, Synthetic construct
EVQLVESGGGLVQPGGSLRLSCAASGFTFSTYAMNWVRQAPGKGLEWVARIRSKYNNYATYYADSVKDRFTISRDDSKNSLYLQMNSLRAEDTAVYYCVRHGNFGNSYVSWFAYWGQGTLVTVSS

SEQ ID NO: 1058 - protein, 125 aa, Synthetic construct
QVQLVESGGGVVQPGRSLRLSCAASGFTFSTYAMNWVRQAPGKGLEWVARIRSKYNNYATYYADSVKDRFTISRDNSKNTLYLQMNSLRAEDTAVYYCARHGNFGNSYVSWFAYWGQGTLVTVSS

SEQ ID NO: 1059 - protein, 125 aa, Synthetic construct
QVQLVESGGGVVQPGRSLRLSCAASGFTFSTYAMNWVRQAPGKGLEWVARIRSKYNNYATYYADSVKDRFTISRDDSKNTLYLQMNSLRAEDTAVYYCARHGNFGNSYVSWFAYWGQGTLVTVSS

SEQ ID NO: 1060 - protein, 125 aa, Synthetic construct
QVQLVESGGGVVQPGRSLRLSCAASGFTFSTYAMNWVRQAPGKGLEWVARIRSKYNNYATYYADSVKDRFTISRDNSKNTLYLQMNSLRAEDTAVYYCVRHGNFGNSYVSWFAYWGQGTLVTVSS

SEQ ID NO: 1061 - protein, 125 aa, Synthetic construct
QVQLVESGGGVVQPGRSLRLSCAASGFTFSTYAMNWVRQAPGKGLEWVARIRSKYNNYATYYADSVKDRFTISRDDSKNTLYLQMNSLRAEDTAVYYCVRHGNFGNSYVSWFAYWGQGTLVTVSS

SEQ ID NO: 1062 - protein, 125 aa, Synthetic construct
QVQLVESGGGVVQPGRSLRLSCAASGFTFSTYAMNWVRQAPGKGLEWVARIRSKYNNYATYYADSVKDRFTISRDDSKNTLYLQMNSLRAEDTAVYYCARHGNFGNSYVTWFAYWGQGTLVTVSS

SEQ ID NO: 1063 - protein, 125 aa, Synthetic construct
QVQLVESGGGVVQPGRSLRLSCAASGFTFSTYAMNWVRQAPGKGLEWVARIRSKYNNYATYYADSVKDRFTISRDDSKNTLYLQMNSLRAEDTAVYYCARHGNFGNSYVSYFAYWGQGTLVTVSS

SEQ ID NO: 1064 - protein, 125 aa, Synthetic construct
QVQLVESGGGVVQPGRSLRLSCAASGFTFSTYAMNWVRQAPGKGLEWVARIRSKYNNYATYYADSVKDRFTISRDDSKNTLYLQMNSLRAEDTAVYYCARHGNFGNSYVSFFAYWGQGTLVTVSS

SEQ ID NO: 1065 - protein, 125 aa, Synthetic construct
QVQLVESGGGVVQPGRSLRLSCAASGFTFSTYAMNWVRQAPGKGLEWVARIRSKYNNYATYYADSVKDRFTISRDDSKNTLYLQMNSLRAEDTAVYYCARHGNFGNSYVSWLAYWGQGTLVTVSS

SEQ ID NO: 1066 - protein, 125 aa, Synthetic construct
QVQLVESGGGVVQPGRSLRLSCAASGFTFSTYAMNWVRQAPGKGLEWVARIRSKYNNYATYYADSVKDRFTISRDDSKNTLYLQMNSLRAEDTAVYYCARHGNFGNSYVSWVAYWGQGTLVTVSS

SEQ ID NO: 1067 - protein, 125 aa, Synthetic construct
QVQLVESGGGVVQPGRSLRLSCAASGFTFSTYAMNWVRQAPGKGLEWVARIRSKYNNYATYYADSVKDRFTISRDDSKNTLYLQMNSLRAEDTAVYYCARHGNFGNSYVSWIAYWGQGTLVTVSS

SEQ ID NO: 1068 - protein, 125 aa, Synthetic construct
QVQLVESGGGVVQPGRSLRLSCAASGFTFSTYAMNWVRQAPGKGLEWVARIRSKYNNYATYYADSVKDRFTISRDDSKNTLYLQMNSLRAEDTAVYYCARHGNFGNSYVSWAAYWGQGTLVTVSS

SEQ ID NO: 1069 - protein, 125 aa, Synthetic construct
QVQLVESGGGVVQPGRSLRLSCAASGFTFSTYAMNWVRQAPGKGLEWVARIRSKYNNYATYYADSVKDRFTISRDDSKNTLYLQMNSLRAEDTAVYYCARHGNFGNSYVSWYAYWGQGTLVTVSS

SEQ ID NO: 1070 - protein, 125 aa, Synthetic construct
QVQLVESGGGVVQPGRSLRLSCAASGFTFSTYAMNWVRQAPGKGLEWVARIRSKYNNYATYYADSVKDRFTISRDDSKNTLYLQMNSLRAEDTAVYYCARHGNFGNSYVSWFVYWGQGTLVTVSS

SEQ ID NO: 1071 - protein, 125 aa, Synthetic construct
QVQLVESGGGVVQPGRSLRLSCAASGFTFSTYAMNWVRQAPGKGLEWVARIRSKYNNYATYYADSVKDRFTISRDDSKNTLYLQMNSLRAEDTAVYYCARHGNFGNSYVSWFLYWGQGTLVTVSS

SEQ ID NO: 1072 - protein, 125 aa, Synthetic construct
QVQLVESGGGVVQPGRSLRLSCAASGFTFSTYAMNWVRQAPGKGLEWVARIRSKYNNYATYYADSVKDRFTISRDDSKNTLYLQMNSLRAEDTAVYYCARHGNFGNSYVSWFIYWGQGTLVTVSS

SEQ ID NO: 1073 - protein, 120 aa, Synthetic construct
EVQLVESGGGLVQPGGSLKLSCAASGFIFSNAVMYWVRQASGKGLEWVARIKTKFNNYATYYADAVKGRFTISRDDSKNMVYLQMNSLKTEDTAVYYCTAGDRNKPFAYWGQGTLVTVSS

SEQ ID NO: 1074 - protein, 125 aa, Synthetic construct
QVQLVESGGGLVQPGGSLKLSCAASGFTFNKYAMNWVRQAPGKGLEWVARIRSKYNNYATYYADSVKDRFTISRDDSKNTAYLQMNNLKTEDTAVYYCVRHGNFGNSYISYWAYWGQGTLVTVSS

SEQ ID NO: 1075 - protein, 119 aa, Synthetic construct
EVQLVESGGGLVQPKGSLKLSCAASGFTFNTNAMNWVRQAPGKGLEWVARIRSKSNNYATYYADSVKDRFTLSRDDSQSMLYLQMNNLKTEDTAMYYCVRDRGWGAMDYWGQGTTVTVS

SEQ ID NO: 1076 - protein, 119 aa, Synthetic construct
GVQLVETGGGLVQPKGSLKLSCAASGFTFNTNAMNWVRQAPGKGLEWVARIRSKSNNYATYYADSVKDRFTLSRDDSQSMLYLQMNNLKTEDTAMYYCVRDRGWGAMDYWGQGTTVTVS

SEQ ID NO: 1077 - protein, 120 aa, Synthetic construct
EVQLVESGGGLVKPGGSLRLSCAASGFTFNTNAMNWVRQAPGKGLEWVARIRSKSNNYATYYADSVKDRFTLSRDDSKNTLYLQMNSLKTEDTAVYYCTRDRGWGAMDYWGQGTTVTVSS

SEQ ID NO: 1078 - protein, 120 aa, Synthetic construct
EVQLVESGGGLVKPGGSLRLSCAASGFTFNTNAMNWVRQAPGKGLEWVARIRSKSNNYATYYADSVKDRFTISRDDSKNTLYLQMNSLKTEDTAVYYCTRDRGWGAMDYWGQGTTVTVSS

SEQ ID NO: 1079 - protein, 119 aa, Synthetic construct
EVQLVETGGGLVQPKGSLKLSCAASGFTFNTNAMNWVRQAPGKGLEWVARIRSKSNNYATYYADSVKDRFTLSRDDSQSMLYLQMNNLKTEDTAMYYCVRDRGWGAMDYWGQGTTVTVS

SEQ ID NO: 1080 - protein, 117 aa, Synthetic construct
EVQLVETGGGLVQPEGSLKLSCATSGFNFNTNAMNWVRQAPGKGLEWVARVRNKTNNYATYYADSVKDRFTISRDDSQRMVFLQMNNLKTEDTAIYYCVAGNSFAYWGQGTLVTVSP

SEQ ID NO: 1081 - protein, 117 aa, Synthetic construct
EVQLVGSGGGLVQPEGSLKLSCAASGFTFKTNAMNWVRQAPGKGLEWVARIRNKTNNYATYYADSVKDRFTISRDDSQSMLYLQMNNLKTEDTAMYFCVAGNSFAYWGQGTLVTVSA

SEQ ID NO: 1082 - protein, 117 aa, Synthetic construct
EVQLVETGGGLVQPKGSLKLSCAASGFTFNTNAMNWVRQAPGKGLQWVARVRNKTNNYATYYADSVKDRFTISRDDSQSMLYLQMNNLKTEDTAIYYCVGGNSFAYWGQGTLVTVSA

SEQ ID NO: 1083 - protein, 117 aa, Synthetic construct
EVQLVGSGGGLVQPEGSLKLSCAASGFTFKTNAMNWVRQAPGKGLEWVARIRNKTNNYATYYADSVKDRFTISRDDSQSMLYLQMNNLKTEDTAMYFCVAGNSFAYLGQGTLVTVSA

SEQ ID NO: 1084 - protein, 117 aa, Synthetic construct
EVQLVETGGGMVQPEGSLKLSCAASGFTFNKNAMNWVRQAPGKGLEWVARIRNKTNNYATYYADSVKARFTISRDDSQSMLYLQMNNLKIEDTAMYYCVAGNSFAYWGQGTLVTVSA

SEQ ID NO: 1085 - protein, 127 aa, Synthetic construct
EVQLVESGGGLVQPGRSLRLSCTASGFTFTDYYMSWVRQAPGKGLEWVGLIRSKADGYTTEYAASVKGRFTISRDDSQSIAYLQMNSLKTEDTAVYYCARDAAYYSYYSPEGAMDYWGQGTLVTVSS

SEQ ID NO: 1086 - protein, 126 aa, Synthetic construct
EVQLVESGGGLVQPGRSLRLSCTASGFTFGDYAMSWVRQAPGKGLEWVGFIRSKAYGGTTEYAASVKGRFTISRDDSKSIAYLQMNSLKTEDTAVYYCTRDIGYYGSGSYSPFDYWGQGTLVTVSS

SEQ ID NO: 1087 - protein, 125 aa, Synthetic construct
EVQLVESGGGLVQPGGSLKLSCAASGFTFSGYAMNWVRQAPGKGLEWVARIRSKANSYATEYAASVKDRFTISRDDSKNTAYLQMNNLKTEDTAVYYCVRHGNAGNSAISYWAYWGQGTLVTVSS

SEQ ID NO: 1088 - protein, 125 aa, Synthetic construct
  VARIANT 68: note = X can be any amino acid
EVQLVESGGGLVQPGGSLRLSCAASGFTFSTYAMNWVRQAPGKGLEWVGRIRSKYNNYATYYADSVKXRFTISRDDSKNSLYLQMNSLKTEDTAVYYCVRHGNFGNSYVSWFAYWGQGTLVTVSS

SEQ ID NO: 1089 - protein, 125 aa, Synthetic construct
  VARIANT 68: note = X can be any amino acid
EVQLVESGGGLVQPGGSLRLSCAASGFTFSTYAMNWVRQAPGKGLEWVGRIRSKYNNYATYYADSVKXRFTISRDDSKNSLYLQMNSLKTEDTAVYYCVRHGNFGNSYVTWFAYWGQGTLVTVSS

SEQ ID NO: 1090 - protein, 125 aa, Synthetic construct
  VARIANT 68: note = X can be any amino acid
EVQLVESGGGLVQPGGSLRLSCAASGFTFSTYAMNWVRQAPGKGLEWVGRIRSKYNNYATYYADSVKXRFTISRDDSKNSLYLQMNSLKTEDTAVYYCVRHKNFGNSYVTWFAYWGQGTLVTVSS

SEQ ID NO: 1091 - protein, 125 aa, Synthetic construct
  VARIANT 68: note = X can be any amino acid
EVQLVESGGGLVQPGGSLRLSCAASGFTFSTYAMNWVRQAPGKGLEWVGRIRSKYNNYATYYADSVKXRFTISRDDSKNSLYLQMNSLKTEDTAVYYCVRHGNFINSYVSWFAYWGQGTLVTVSS

SEQ ID NO: 1092 - protein, 125 aa, Synthetic construct
  VARIANT 68: note = X can be any amino acid
EVQLVESGGGLVQPGGSLRLSCAASGFTFSTYAMNWVRQAPGKGLEWVGRIRSKYNNYATYYADSVKXRFTISRDDSKNSLYLQMNSLKTEDTAVYYCVRHGNFGNSAVSWFAYWGQGTLVTVSS

SEQ ID NO: 1093 - protein, 125 aa, Synthetic construct
  VARIANT 68: note = X can be any amino acid
EVQLVESGGGLVQPGGSLRLSCAASGFTFSTYAMNWVRQAPGKGLEWVGRIRSKYNNYATYYADSVKXRFTISRDDSKNSLYLQMNSLKTEDTAVYYCVRHGNFGNSGVSWFAYWGQGTLVTVSS

SEQ ID NO: 1094 - protein, 125 aa, Synthetic construct
  VARIANT 68: note = X can be any amino acid
EVQLVESGGGLVQPGGSLRLSCAASGFTFSTYAMNWVRQAPGKGLEWVGRIRSKYNNYATYYADSVKXRFTISRDDSKNSLYLQMNSLKTEDTAVYYCVRHGNFGNSQVSWFAYWGQGTLVTVSS

SEQ ID NO: 1095 - protein, 125 aa, Synthetic construct
  VARIANT 68: note = X can be any amino acid
EVQLVESGGGLVQPGGSLRLSCAASGFTFSTYAMNWVRQAPGKGLEWVGRIRSKYNNYATYYADSVKXRFTISRDDSKNSLYLQMNSLKTEDTAVYYCVRHDNFGNSYVSWFAYWGQGTLVTVSS

SEQ ID NO: 1096 - protein, 125 aa, Synthetic construct
  VARIANT 68: note = X can be any amino acid
EVQLVESGGGLVQPGGSLRLSCAASGFTFSTYAMNWVRQAPGKGLEWVGRIRSKYNNYATYYADSVKXRFTISRDDSKNSLYLQMNSLKTEDTAVYYCVRHENFGNSYVSWFAYWGQGTLVTVSS

SEQ ID NO: 1097 - protein, 125 aa, Synthetic construct
  VARIANT 68: note = X can be any amino acid
EVQLVESGGGLVQPGGSLRLSCAASGFTFSTYAMNWVRQAPGKGLEWVGRIRSKYNNYATYYADSVKXRFTISRDDSKNSLYLQMNSLKTEDTAVYYCVRHKNFGNSYVSWFAYWGQGTLVTVSS

SEQ ID NO: 1098 - protein, 125 aa, Synthetic construct
  VARIANT 68: note = X can be any amino acid
EVQLVESGGGLVQPGGSLRLSCAASGFTFSTYAMNWVRQAPGKGLEWVGRIRSKYNNYATYYADSVKXRFTISRDDSKNSLYLQMNSLKTEDTAVYYCVRHGNIGNSYVSWFAYWGQGTLVTVSS

SEQ ID NO: 1099 - protein, 125 aa, Synthetic construct
  VARIANT 68: note = X can be any amino acid
EVQLVESGGGLVQPGGSLRLSCAASGFTFSTYAMNWVRQAPGKGLEWVGRIRSKYNNYATYYADSVKXRFTISRDDSKNSLYLQMNSLKTEDTAVYYCVRHGNFGNSYVSFFAYWGQGTLVTVSS

SEQ ID NO: 1100 - protein, 125 aa, Synthetic construct
  VARIANT 68: note = X can be any amino acid
EVQLVESGGGLVQPGGSLRLSCAASGFTFSTYAMNWVRQAPGKGLEWVGRIRSKYNNYATYYADSVKXRFTISRDDSKNSLYLQMNSLKTEDTAVYYCVRHGNFGNSYVSYFAYWGQGTLVTVSS

SEQ ID NO: 1101 - protein, 125 aa, Synthetic construct
  VARIANT 68: note = X can be any amino acid
EVQLVESGGGLVQPGGSLRLSCAASGFTFSTYAMNWVRQAPGKGLEWVGRIRSKYNNYATYYADSVKXRFTISRDDSKNSLYLQMNSLKTEDTAVYYCVRHGNFGNSYVSWFAEWGQGTLVTVSS

SEQ ID NO: 1102 - protein, 125 aa, Synthetic construct
  VARIANT 68: note = X can be any amino acid
EVQLVESGGGLVQPGGSLRLSCAASGFTFSDYAMNWVRQAPGKGLEWVGRIRSKYNNYATYYADSVKXRFTISRDDSKNSLYLQMNSLKTEDTAVYYCVRHGNFGNSYVSWFAYWGQGTLVTVSS

SEQ ID NO: 1103 - protein, 125 aa, Synthetic construct
  VARIANT 68: note = X can be any amino acid
EVQLVESGGGLVQPGGSLRLSCAASGFTFSEYAMNWVRQAPGKGLEWVGRIRSKYNNYATYYADSVKXRFTISRDDSKNSLYLQMNSLKTEDTAVYYCVRHGNFGNSYVSWFAYWGQGTLVTVSS

SEQ ID NO: 1104 - protein, 125 aa, Synthetic construct
  VARIANT 68: note = X can be any amino acid
EVQLVESGGGLVQPGGSLRLSCAASGFTFSTDAMNWVRQAPGKGLEWVGRIRSKYNNYATYYADSVKXRFTISRDDSKNSLYLQMNSLKTEDTAVYYCVRHGNFGNSYVSWFAYWGQGTLVTVSS

SEQ ID NO: 1105 - protein, 125 aa, Synthetic construct
  VARIANT 68: note = X can be any amino acid
EVQLVESGGGLVQPGGSLRLSCAASGFTFSTTAMNWVRQAPGKGLEWVGRIRSKYNNYATYYADSVKXRFTISRDDSKNSLYLQMNSLKTEDTAVYYCVRHGNFGNSYVSWFAYWGQGTLVTVSS

SEQ ID NO: 1106 - protein, 125 aa, Synthetic construct
  VARIANT 68: note = X can be any amino acid
EVQLVESGGGLVQPGGSLRLSCAASGFTFSTYGMNWVRQAPGKGLEWVGRIRSKYNNYATYYADSVKXRFTISRDDSKNSLYLQMNSLKTEDTAVYYCVRHGNFGNSYVSWFAYWGQGTLVTVSS

SEQ ID NO: 1107 - protein, 125 aa, Synthetic construct
  VARIANT 68: note = X can be any amino acid
EVQLVESGGGLVQPGGSLRLSCAASGFTFSTYAMNWVRQAPGKGLEWVGRIRSKYNNYATYYADSVKXRFTISRDDSKNSLYLQMNSLKTEDTAVYYCVRHKNIGNSYVSWFAYWGQGTLVTVSS

SEQ ID NO: 1108 - protein, 125 aa, Synthetic construct
  VARIANT 68: note = X can be any amino acid
EVQLVESGGGLVQPGGSLRLSCAASGFTFSTYAMNWVRQAPGKGLEWVGRIRSKYNNYATYYADSVKXRFTISRDDSKNSLYLQMNSLKTEDTAVYYCVRHKNFGNSGVSWFAYWGQGTLVTVSS

SEQ ID NO: 1109 - protein, 125 aa, Synthetic construct
  VARIANT 68: note = X can be any amino acid
EVQLVESGGGLVQPGGSLRLSCAASGFTFSTYAMNWVRQAPGKGLEWVGRIRSKYNNYATYYADSVKXRFTISRDDSKNSLYLQMNSLKTEDTAVYYCVRHKNFGNSYVSFFAYWGQGTLVTVSS

SEQ ID NO: 1110 - protein, 125 aa, Synthetic construct
  VARIANT 68: note = X can be any amino acid
EVQLVESGGGLVQPGGSLRLSCAASGFTFSTYAMNWVRQAPGKGLEWVGRIRSKYNNYATYYADSVKXRFTISRDDSKNSLYLQMNSLKTEDTAVYYCVRHKNFGNSYVSYFAYWGQGTLVTVSS

SEQ ID NO: 1111 - protein, 125 aa, Synthetic construct
EVQLVESGGGLVQPGGSLRLSCAASGFTFSTYAMNWVRQAPGKGLEWVGRIRSKYNNYATYYADSVKDRFTISRDDSKNSLYLQMNSLKTEDTAVYYCVRHGNFGNSYVTWFAYWGQGTLVTVSS

SEQ ID NO: 1112 - protein, 125 aa, Synthetic construct
EVQLVESGGGLVQPGGSLRLSCAASGFTFSTYAMNWVRQAPGKGLEWVGRIRSKYNNYATYYADSVKDRFTISRDDSKNSLYLQMNSLKTEDTAVYYCVRHKNFGNSYVTWFAYWGQGTLVTVSS

SEQ ID NO: 1113 - protein, 125 aa, Synthetic construct
EVQLVESGGGLVQPGGSLRLSCAASGFTFSTYGMNWVRQAPGKGLEWVGRIRSKYNNYATYYADSVKDRFTISRDDSKNSLYLQMNSLKTEDTAVYYCVRHGNFGNSYVSWFAYWGQGTLVTVSS

SEQ ID NO: 1114 - protein, 125 aa, Synthetic construct
  VARIANT 31: note = X can be any amino acid
  VARIANT 32: note = X can be any amino acid
  VARIANT 33: note = X can be any amino acid
  VARIANT 68: note = X can be any amino acid
  VARIANT 102: note = X can be any amino acid
  VARIANT 104: note = X can be any amino acid
  VARIANT 105: note = X can be any amino acid
  VARIANT 108: note = X can be any amino acid
  VARIANT 110: note = X can be any amino acid
  VARIANT 111: note = X can be any amino acid
  VARIANT 114: note = X can be any amino acid
EVQLVESGGGLVQPGGSLRLSCAASGFTFSXXXMNWVRQAPGKGLEWVGRIRSKYNNYATYYADSVKXRFTISRDDSKNSLYLQMNSLKTEDTAVYYCVRHXNXXNSXVXXFAXWGQGTLVTVSS

SEQ ID NO: 1115 - protein, 125 aa, Synthetic construct
EVQLVESGGGLVQPGGSLRLSCAASGFTFSTYGMNWVRQAPGKGLEWVGRIRSKYNNYATYYADSVKGRFTISRDDSKNSLYLQMNSLKTEDTAVYYCVRHGNFGNSYVSWFAYWGQGTLVTVSS

SEQ ID NO: 1116 - protein, 125 aa, Synthetic construct
EVQLVESGGGLVQPGGSLRLSCAASGFTFSTYAMNWVRQAPGKGLEWVGRIRSKYNNYATYYADSVKDRFTISRDDSKNSLYLQMNSLKTEDTAVYYCVRHGNFGNSYVSWFAEWGQGTLVTVSS

SEQ ID NO: 1117 - protein, 125 aa, Synthetic construct
EVQLVESGGGLVQPGGSLRLSCAASGFTFSTTAMNWVRQAPGKGLEWVGRIRSKYNNYATYYADSVKDRFTISRDDSKNSLYLQMNSLKTEDTAVYYCVRHGNFGNSYVSWFAYWGQGTLVTVSS

SEQ ID NO: 1118 - protein, 125 aa, Synthetic construct
EVQLVESGGGLVQPGGSLRLSCAASGFTFSTYAMNWVRQAPGKGLEWVGRIRSKYNNYATYYADSVKDRFTISRDDSKNSLYLQMNSLKTEDTAVYYCVRHKNIGNSYVSWFAYWGQGTLVTVSS

SEQ ID NO: 1119 - protein, 125 aa, Synthetic construct
EVQLVESGGGLVQPGGSLRLSCAASGFTFSTYAMNWVRQAPGKGLEWVGRIRSKYNNYATYYADSVKGRFTISRDDSKNSLYLQMNSLKTEDTAVYYCVRHGNFGNSYVSWFAEWGQGTLVTVSS

SEQ ID NO: 1120 - protein, 125 aa, Synthetic construct
EVQLVESGGGLVQPGGSLRLSCAASGFTFSTTAMNWVRQAPGKGLEWVGRIRSKYNNYATYYADSVKGRFTISRDDSKNSLYLQMNSLKTEDTAVYYCVRHGNFGNSYVSWFAYWGQGTLVTVSS

SEQ ID NO: 1121 - protein, 125 aa, Synthetic construct
EVQLVESGGGLVQPGGSLRLSCAASGFTFSTYAMNWVRQAPGKGLEWVGRIRSKYNNYATYYADSVKGRFTISRDDSKNSLYLQMNSLKTEDTAVYYCVRHKNIGNSYVSWFAYWGQGTLVTVSS

SEQ ID NO: 1122 - protein, 125 aa, Synthetic construct
  VARIANT 31: note = X can be any amino acid
  VARIANT 32: note = X can be any amino acid
  VARIANT 33: note = X can be any amino acid
  VARIANT 68: note = X can be any amino acid
  VARIANT 102: note = X can be any amino acid
  VARIANT 104: note = X can be any amino acid
  VARIANT 105: note = X can be any amino acid
  VARIANT 108: note = X can be any amino acid
  VARIANT 111: note = X can be any amino acid
  VARIANT 114: note = X can be any amino acid
EVQLVESGGGLVQPGGSLRLSCAASGFTFSXXXMNWVRQAPGKGLEWVGRIRSKYNNYATYYADSVKXRFTISRDDSKNSLYLQMNSLKTEDTAVYYCVRHXNXXNSXSTXFAXWGQGTLVTVSS

SEQ ID NO: 1123 - protein, 123 aa, Synthetic construct
EVQLVETGGGLVQPKGSLKLSCAASGFTFNINAMNWVRQAPGKGLEWVARIRSKSNNYATYYADSVKDRFTISRDDSQSMLYLQMNNLKTEDTAMYYCVRGGYGSSPYDMDYWGQGTSVTVSS

SEQ ID NO: 1124 - protein, 128 aa, Synthetic construct
EVQLVETGGGLVQPKGSLKLSCAASGFTFSTNAMNWVRQAPGKGLEWIARIRSKSNNYATHYADSVKDRFTISRDDSQSILHLQMNNLKNEDTAMYYCVRDSHYYVSTYVGLAWFAYWGQGTLVTVSA

SEQ ID NO: 1125 - protein, 121 aa, Synthetic construct
EVQLVESGGGLVQPKGSLKLSCAASGFTFNTYAMNWVRQAPGKGLEWVARIRSKSNNYATYYADSVKDRFTISRDDSQSMLYLQMNNLKTEDTAMYYCVRGLLRYRFFDVWGAGTTVTVSS

SEQ ID NO: 1126 - protein, 121 aa, Synthetic construct
EVQLVESGGGLVQPGGSLKLSCAASGFTFNTYAMNWVRQASGKGLEWVGRIRSKSNNYATYYADSVKDRFTISRDDSKNTAYLQMNSLKTEDTAVYYCVRGLLRYRFFDVWGQGTTVTVSS

SEQ ID NO: 1127 - protein, 121 aa, Synthetic construct
EVQLVESGGGLVQPGRSLRLSCTASGFTFATYAMNWVRQAPGKGLEWVARIRSKSNNYATYYADSVKDRFTISRDDSKSILYLQMNSLKTEDTAVYYCVRGLLRYRFFDVWGQGTTVTVSS

SEQ ID NO: 1128 - protein, 121 aa, Synthetic construct
EVQLVESGGGLVQPGGSLRLSCAASGFTFSSFALNWVRQAPGKGLEWVGHIRSKTNNYATFYAASVKGRFTVSRDDSQNTAYLQMNSLKTEDTATYYCVRRGPRDSWFGYWGQGTLVTVSS

SEQ ID NO: 1129 - protein, 121 aa, Synthetic construct
EVQLVESGGGLVQPGGSLRLSCAASGFTFSSFALNWVRQAPGKGLEWVGHIRSKTNNYVTFYAASVKGRFTVSRDDSQNTAYLQMNSLKTEDTATYYCVRRGPRDSWFGYWGQGTLVTVSS

SEQ ID NO: 1130 - protein, 121 aa, Synthetic construct
EVQLVESGGGLVQPGGSLRLSCAASGFTFSSFALNWVRQAPGKGLEWVGHIRSETNNYATFYAASVKGRFTVSRDDSQNTAYLQMNSLKTEDTATYYCVRRGPRDSWFGYWGQGTLVTVSS

SEQ ID NO: 1131 - protein, 121 aa, Synthetic construct
EVQLVESGGGLVQPGGSLRLSCAASGFTFSSFALNWVRQAPGKGLEWVGHIRSETNNYVTFYAASVKGRFTVSRDDSQNTAYLQMNSLKTEDTATYYCVRRGPRDSWFGYWGQGTLVTVSS

SEQ ID NO: 1132 - protein, 122 aa, Synthetic construct
EVQLVESGGGLVQPGGSLRLSCAASGFTFSSYAMSWVRQAPGKGLEWVSAISGSGGSTYYADSVKGRFTISRDNSKNTLYLQMNSLRAEDTAVYYCAKVRGHGGNSGWVDYWGQGTLVTVSS

SEQ ID NO: 1133 - protein, 129 aa, Synthetic construct
EVQLEVQLVESGGGLVKPGGSLRLSCAASGFTFNTYAMNWVRQAPGKGLEWVARIRSKYNNYATYYADSVKGRFTISRDDSKNSLYLQMNSLKTEDTAVYYCVRHGNFGNSYVSWFAYWGQGTLVTVSS

SEQ ID NO: 1134 - protein, 125 aa, Synthetic construct
EVQLVESGGGLVKPGGSLRLSCAASGFTFNTYAMNWVRQAPGKGLEWVARIRSKYNNYATYYADSVKGRFTISRDDSKNSLYLQMNSLKTEDTAVYYCVRHGNFGNSYVSWFAYWGQGTLVTVSS

SEQ ID NO: 1135 - protein, 130 aa, Synthetic construct
EVQLEVQLVESGGGLVQPGGSLRLSCAASGFTFSSYAMNWVRQAPGKGLEWVARISGSGGSTYYADSVKDRFTISRDDSKNSLYLQMNSLKTEDTAVYYCVRGKGNTHKPYGYVRYFDVWGQGTLVTVSS

SEQ ID NO: 1136 - protein, 117 aa, Synthetic construct
EVQLVESGGGLVQPGGSLRLSCAASGFTFNKNAMNWVRQAPGKGLEWVGRIRNKTNNYATYYADSVKARFTISRDDSKNSLYLQMNSLKTEDTAVYYCVAGNSFAYWGQGTLVTVSS

SEQ ID NO: 1137 - protein, 125 aa, Synthetic construct
EVKLLESGGGLVQPKGSLKLSCAASGFTFNTYAMNWVRQAPGKGLEWVARIRSKYNNYATYYADSVKDRFTISRDDSQSILYLQMNNLKTEDTAMYYCVRHGNFGNSYVSWFAYWGQGTLVTVSS

SEQ ID NO: 1138 - protein, 129 aa, Synthetic construct
EVQLEVQLLESGGGLVQPGGSLKLSCAASGFTFNTYAMNWVRQAPGKGLEWVARIRSKYNNYATYYADSVKDRFTISRDDSKNTAYLQMNNLKTEDTAVYYCVRHGNFGNSYVSWFAYWGQGTLVTVSS

SEQ ID NO: 1139 - protein, 125 aa, Synthetic construct
EVQLVESGGGLVQPGGSLKLSCAASGFTFNTYAMNWVRQAPGKGLEWVARIRSKYNNYATYYADSVKDRFTISRDDSKNTAYLQMNNLKTEDTAMYYCVRHGNFGNSYVSWFAYWGQGTLVTVSS

SEQ ID NO: 1140 - protein, 125 aa, Synthetic construct
EVQLVESGGGLVQPGGSLRLSCAASGFTFNTYAMNWYRQAPGKGLEWVARIRSKYNNYATYYADSVKDRFTISRDDSKNSLYLQMNSLKTEDTAVYYCARHGNFGNSYVSWFAYWGQGTLVTVSS

SEQ ID NO: 1141 - protein, 121 aa, Synthetic construct
EVQLVEFGGGLVQPKGSLKLSCAASGFTFNTNAMHWVRQAPGKGLEWVARIGSKSSYFATYYADSVKDRFTISRDDSRSMFYLQMNNLKTEDTAMYYCVREDYYGSSFDLWGQGTTLTVSS

SEQ ID NO: 1142 - protein, 121 aa, Synthetic construct
EVQLVESGGGLVQPKGSLKLSCAASGFTFNIYAMHWVRQAPGKGLEWVARIGSKSSNYATNYADSVKDRFTISRDDSQSMLCLQMNNLKTEDTAMYYCVREDYYGNSFDSWGQGTTLAVSS

SEQ ID NO: 1143 - protein, 121 aa, Synthetic construct
EVQLVESGGGLVQPKGSLKLSCAASGFTFNTYAMHWVRQAPGKGLEWVARIGSKSSYYATYYADSVKDRFTISRADSQSMLYLQMNNLKTEDTAIYYCVREDYYGCSFDYWGQGTTLTVSS

SEQ ID NO: 1144 - protein, 121 aa, Synthetic construct
EVQLVGSGGGLVQPKGSLKLSCAASGFTFNTYAMHWVRQAPGKGLEWVARIGSKSSYYATYYADSVKDRFTISRDDSQSMLYLQMNNLKTEDTAMYYCVREDYYGSSYDYWGQGTTLTVSS

SEQ ID NO: 1145 - protein, 121 aa, Synthetic construct
EVQLIESGGGLVQPKGSLKLSCAASGFTFNSYAMHWVRQAPGKGLEWVARIRSKNVHYATYYADSVKDRFTISRDDSQSMLYLQMNNLKTEDTAMYFCVREDYYGSSYDYWGQGTTLTVSS

SEQ ID NO: 1146 - protein, 121 aa, Synthetic construct
EVQLVESGGGLVQPKGSLKLSCAASGFTFNTYAMHWVRQAPGKGLEWVARIRSKNVHYATYYADSVKDRFTISRDDSQNMLYLQMNNLKTEDTAMYYCVREDYYGSSYDYWGQGTTLTVSS

SEQ ID NO: 1147 - protein, 121 aa, Synthetic construct
EVQLVESGGGLVQPKGSLKLSCAASGFTFYSYAMHWVRQAPGRGLEWVARIRSKNVHYATYYADSVKDRFTISRDDSQNMLYLQMNNLKTEDTAMYYCVREDYYGSSYDYWGQGTTLTVSS

SEQ ID NO: 1148 - protein, 121 aa, Synthetic construct
EVQLVESGGGLVQPKGSLKLSCAASGFTFNSYAMHWVRQAPGKGLEWVACIRSKSSYYATYYADSVKDRFTISRHDSQSMLYLQMNNLKTEDTAMYYCVREDYYGSSYDYWGQGTTLTVSS

SEQ ID NO: 1149 - protein, 121 aa, Synthetic construct
EVQLVESGGGLVQPKGSLKLSCAASGFTFNTYAMHWVRQAPGKGLEWVARIRSKTTNYATYYADSVKDRFTISRDDSQSMLYLQISNLKTEDTAMYYCVREDYYGSSLDYWGQGTTLTVSS

SEQ ID NO: 1150 - protein, 118 aa, Synthetic construct
QVKLQESGGGLVQAGGSLRLSCAASGFTFATYAMAWYRQAPGKQRELVASISNFGSTAYGDSVKGRFTISRDNAKNTVYLEMNSLKSEDTAVYYCKRVRDVIGRPELWGQGTQVTVSS

SEQ ID NO: 1151 - protein, 122 aa, Synthetic construct
EVQLVESGGGLVQPGGSLRLSCSASGFTFSSYAMNWVRQAPGKGLEWVTAISGSGGGTYYADSVKGRFTISRDNSKNSLFLQLNSLRAEDTAVYYCAKQTYTSSWYGGFDIWGQGTMVTVSS

SEQ ID NO: 1152 - protein, 114 aa, Synthetic construct
EVQLLESGGGLVQPGGSLRLSCAASGFTFSTYAMSWVRQAPGKGLEWVSAISGSGRSTYYADSVKGRFTISRDNSKNTLYLQLSSLRAEDTAVYFCARDGGVYWGQGTLVTVSS

SEQ ID NO: 1153 - protein, 121 aa, Synthetic construct
NNVFQNKEKNYYEAFYTEEKFKKALKVTTPEAYKSLVDLNIQKDSLNRARYGYIQRATVKTSPLSYFGKTTYYSLNKKDSEETLQLNNVVKYLILTAAMNDVEVMNLLRIKINPVFKKINN

SEQ ID NO: 1154 - protein, 116 aa, Synthetic construct
QSVEESGGRLVTPGTPLTLTCTVSGFSLSTYAMGWVRQAPGKGLEWIGTIDTGDNSFYANWAKGRFTISKTSTTVDLKITSPTAEDTATYFCARNDGSVYNLFNLWGPGTLVTVSS

SEQ ID NO: 1155 - protein, 116 aa, Synthetic construct
QSVEESGGRLVTPGTPLTLTCTVSGFSLSTYAMGWVRQAPGKGLEWIGTIDTGDNSFYANWAKGRFTISRTSTTVDLKITSPTAEDTATYFCARNDGSVYNLFNLWGPGTLVTVSS

SEQ ID NO: 1156 - protein, 98 aa, Synthetic construct
QVQLVQSGSELKKPGASVKVSCKASGYTFTSYAMNWVRQAPGQGLEWMGWINTNTGNPTYAQGFTGRFVFSLDTSVSTAYLQICSLKAEDTAVYYCAR

SEQ ID NO: 1157 - protein, 121 aa, Synthetic construct
QVQLVQSGSELKKPGASVKVSCKASGYTFTSYAMNWVRQAPGQGLEWMGWINTNTGNPTYAQGFTGRFVFSLDTSVSTAYLQICSLKAEDTAVYYCARYYDGYYRRWFAYWGQGTLVTVSS

SEQ ID NO: 1158 - protein, 119 aa, Synthetic construct
QVQLVESGGSVVQPGRSLRLSCAASGFTFSTYAMYWVRQTPGKGLEWVAVLYSDGSNKYYIDSVKGRFTISRDTSTNTLYLQMSSLRADDSALYYCARLNWDYWYFDLWGRGTLVTVSS

SEQ ID NO: 1159 - protein, 118 aa, Synthetic construct
EVQLVQSGGGLVQPGGSLRLSCAASGFTFNNYAMNWVRQAPGKGLDWVSTISGSGGTTNYADSVKGRFIISRDSSKHTLYLQMNSLRAEDTAVYYCAKDSNWGNFDLWGRGTTVTVSS

SEQ ID NO: 1160 - protein, 118 aa, Synthetic construct [sequence omitted]

SEQ ID NO: 1161 - protein, 120 aa, Synthetic construct
EVQKVESGGGLVKPGGSLRLSCTASGFTFSTYNMNWVRQAPGKGLEWVSSIRSSSNYIYYADSVKGRFTISRDNAKNSLYLQMNSLRADDTAVYYCARDGSSWYDYSDYWGQGTLVTVSS

SEQ ID NO: 1162 - protein, 120 aa, Synthetic construct
EVQLVESGGGLVKPGGSLRLSCTASGFTFSTYNMNWVRQAPGKGLEWVSSIRSSSNYIYYADSVKGRFTISRDNAKNSLYLQMNSLRADDTAVYYCARDGSSWYDYSDYWGQGTLVTVSS

SEQ ID NO: 1163 - protein, 120 aa, Synthetic construct
EVQLVESGGGLVKPGGSLRLSCAASGFTFSTYNMNWVRQAPGKGLEWVSSIRSSSNYIYYADSVKGRFTISRDNAKNSLYLQMNSLRAEDTAVYYCARDGSSWYDYSDYWGQGTLVTVSS

SEQ ID NO: 1164 - protein, 120 aa, Synthetic construct
EVQLVESGGGLVKPGGSLRLSCTASGFTFSTYNMNWVRQAPGKGLEWVSSIRSSSNYIYYADSVKGRFTISRDNAKSSLYLQMNSLRAEDTAVYYCARDGSSWYDYSDYWGQGTLVTVSS

SEQ ID NO: 1165 - protein, 122 aa, Synthetic construct
EVQLLESGGGLVQPGGSLRLSCAASGFTFSSYAMNWVRQAPGKGLDWVSGISGNGGSTYYADSVKGRFTISRDISKNTLYVQMHSLRVEDTAVYYCAKARYYDFWGGNFDLWGRGTQVTVSS

SEQ ID NO: 1166 - protein, 122 aa, Synthetic construct
EVQLLESGGGLVQPGGSLRLSCAASGFTFSSYAMNWVRQAPGKGLDWVSGISGNGGSTYYADSVKGRFTISRDISKNTLYVQMHSLRVEDTAVYYCAKARYYDFWGGNFDLWGRGTLVTVSS

SEQ ID NO: 1167 - protein, 119 aa, Synthetic construct
EVQLVESGGDLVQPGGSLRLSCAASGFTFKTYWMNWVRQAPGKGLEWVANIRADGGQMYYADSVKGRFTISRDNAKDSLYLQMISLRPEDTALYYCARDPFASGGLDQWGQGTMVTVSS

SEQ ID NO: 1168 - protein, 116 aa, Synthetic construct
EVKLVESGGGLVKPGGSLKLSCAASGFTFSTYAMSWVRQTPEKRLEWVASISTGGSTYYPDSVKGRFTISRDNARNILYLQMSSLRSEDTAMYYCARDYDGYFDYWGQGTTLTVSS

SEQ ID NO: 1169 - protein, 116 aa, Synthetic construct
EVQLVESGGGLVQPGGSLRLSCAASGFTFSTYAMSWVRQAPGKGLEWVASISTGGSTYYPDSVKGRFTISRDNAKNTLYLQMNSLRAEDTAVYYCARDYDGYFDYWGQGTLVTVSS

SEQ ID NO: 1170 - protein, 144 aa, Synthetic construct
MFVAWMTTVSIGVLVARFFKPVWSKAFLLGEAAWFQVHRMLMFTTTVLTCIAFVMPFIYRGGWSRHAGYHPYLGCIVMTLAVLQPLLAVFRPPLHDPRRQMFNWTHWSMGTAARIIAVAAMFLGMNLPGLNLPDSWKTYAMTDS

SEQ ID NO: 1171 - protein, 115 aa, Synthetic construct
EVQLLESGGGLVQPGGSLRLSCAASGFTFSSYAMNWVRQAPGKGLEWVSAISDSGGSTYYADSVKGRFTISRDNSKNTLYLQMNSLRAEDTAVYYCARYWPMDIWGQGTLVTVSS

SEQ ID NO: 1172 - protein, 115 aa, Synthetic construct
EVQLLESGGGLVQPGGSLRLSCAASGFTFSSYAMNWVRQAPGKGLEWVSAISDSGGSAWYADSVKGRFTISRDNSKNTLYLQMNSLRAEDTAVYYCARYWPMSLWGQGTLVTVSS

SEQ ID NO: 1173 - protein, 115 aa, Synthetic construct
EVQLLESGGGLVQPGGSLRLSCAASGFTFSSYAMNWVRQAPGKGLEWVSAISDSGGSMWYADSVKGRFTISRDNSKNTLYLQMNSLRAEDTAVYYCARYWPMSLWGQGTLVTVSS

SEQ ID NO: 1174 - protein, 115 aa, Synthetic construct
EVQLLESGGGLVQPGGSLRLSCAASGFTFSSYAMNWVRQAPGKGLEWVSAISDFGGSTYYADSVKGRFTISRDNSKNTLYLQMNSLRAEDTAVYYCARYWPMDIWGQGTLVTVSS

SEQ ID NO: 1175 - protein, 115 aa, Synthetic construct
EVQLLESGGGLVQPGGSLRLSCAASGFTFSSYAMNWVRQAPGKGLEWVSAITASGGSTYYADSVKGRFTISRDNSKNTLYLQMNSLRAEDTAVYYCARYWPMSLWGQGTLVTVSS

SEQ ID NO: 1176 - protein, 115 aa, Synthetic construct
EVQLLESGGGLVQPGGSLRLSCAASGFTFSSYAMNWVRQAPGKGLEWVSAISDSGGSTYYADSVKGRFTISRDNSKNTLYLQMNSLRAEDTAVYYCARYWPMSLWGQGTLVTVSS

SEQ ID NO: 1177 - protein, 115 aa, Synthetic construct
EVQLLESGGGLVQPGGSLRLSCAASGFTFSSYAMNWVRQAPGKGLEWVSAISDSGGSRWYADSVKGRFTISRDNSKNTLYLQMNSLRAEDTAVYYCARYWPMTPWGQGTLVTVSS

SEQ ID NO: 1178 - protein, 115 aa, Synthetic construct
EVQLLESGGGLVQPGGSLRLSCAASGFTFSSYAMNWVRQAPGKGLEWVSAVLDSGGSTYYADSVKGRFTISRDNSKNTLYLQMNSLRAEDTAVYYCARYWPMTPWGQGTLVTVSS

SEQ ID NO: 1179 - protein, 115 aa, Synthetic construct
EVQLLESGGGLVQPGGSLRLSCAASGFTFSSYAMNWVRQAPGKGLEWVSAISDSGGSRWYADSVKGRFTISRDNSKNTLYLQMNSLRAEDTAVYYCARYWPMSDWGQGTLVTVSS

SEQ ID NO: 1180 - protein, 115 aa, Synthetic construct
EVQLLESGGGLVQPGGSLRLSCAASGFTFSSYAMNWVRQAPGKGLEWVSAISDSGGSKWYADSVKGRFTISRDNSKNTLYLQMNSLRAEDTAVYYCARYWPMSLWGQGTLVTVSS

SEQ ID NO: 1181 - protein, 115 aa, Synthetic construct
EVQLLESGGGLVQPGGSLRLSCAASGFTFSSYAMNWVRQAPGKGLEWVSAIGGSGGSLPYADSVKGRFTISRDNSKNTLYLQMNSLRAEDTAVYYCARYWPMDSWGQGTLVTVSS

SEQ ID NO: 1182 - protein, 115 aa, Synthetic construct
EVQLLESGGGLVQPGGSLRLSCAASGFTFSSYAMNWVRQAPGKGLEWVSAISDSGGSGWYADSVKGRFTISRDNSKNTLYLQMNSLRAEDTAVYYCARYWPMSLWGQGTLVTVSS

SEQ ID NO: 1183 - protein, 115 aa, Synthetic construct
EVQLLESGGGLVQPGGSLRLSCAASGFTFSSYAMNWVRQAPGKGLEWVSAVLDSGGSTYYADSVKGRFTISRDNSKNTLYLQMNSLRAEDTAVYYCARYWPMSLWGQGTLVTVSS

SEQ ID NO: 1184 - protein, 115 aa, Synthetic construct
EVQLLESGGGLVQPGGSLRLSCAASGFTFSSYAMNWVRQAPGKGLEWVSAISDSGGSCWYADSVKGRFTISRDNSKNTLYLQMNSLRAEDTAVYYCARYWPMTPWGQGTLVTVSS

SEQ ID NO: 1185 - protein, 115 aa, Synthetic construct
EVQLLESGGGLVQPGGSLRLSCAASGFTFSSYAMNWVRQAPGKGLEWVSAIFASGGSTYYADSVKGRFTISRDNSKNTLYLQMNSLRAEDTAVYYCARYWPMTPWGQGTLVTVSS

SEQ ID NO: 1186 - protein, 115 aa, Synthetic construct
EVQLLESGGGLVQPGGSLRLSCAASGFTFSSYAMNWVRQAPGKGLEWVSAISGWGGSLPYADSVKGRFTISRDNSKNTLYLQMNSLRAEDTAVYYCARYWPMDSWGQGTLVTVSS

SEQ ID NO: 1187 - protein, 115 aa, Synthetic construct
EVQLLESGGGLVQPGGSLRLSCAASGFTFSSYAMNWVRQAPGKGLEWVSAIMSSGGPLYYADSVKGRFTISRDNSKNTLYLQMNSLRAEDTAVYYCARYWPMALWGQGTLVTVSS

SEQ ID NO: 1188 - protein, 115 aa, Synthetic construct
EVQLLESGGGLVQPGGSLRLSCAASGFTFSSYAMNWVRQAPGKGLEWVSAILMSGGSTYYADSVKGRFTISRDNSKNTLYLQMNSLRAEDTAVYYCARYWPMSLWGQGTLVTVSS

SEQ ID NO: 1189 - protein, 115 aa, Synthetic construct
EVQLLESGGGLVQPGGSLRLSCAASGFTFSSYAMNWVRQAPGKGLEWVSAISDSGGYRYYADSVKGRFTISRDNSKNTLYLQMNSLRAEDTAVYYCARYWPMSLWGQGTLVTVSS

SEQ ID NO: 1190 - protein, 115 aa, Synthetic construct
EVQLLESGGGLVQPGGSLRLSCAASGFTFSSYAMNWVRQAPGKGLEWVSAILSSGGSTYYADSVKGRFTISRDNSKNTLYLQMNSLRAEDTAVYYCARYWPMDIWGQGTLVTVSS

SEQ ID NO: 1191 - protein, 115 aa, Synthetic construct
EVQLLESGGGLVQPGGSLRLSCAASGFTFSSYAMNWVRQAPGKGLEWVSAILDSGGSTYYADSVKGRFTISRDNSKNTLYLQMNSLRAEDTAVYYCARYWPMSPWGQGTLVTVSS

SEQ ID NO: 1192 - protein, 115 aa, Synthetic construct
EVQLLESGGGLVQPGGSLRLSCAASGFTFSSYAMNWVRQAPGKGLEWVSAISDSGGSRWYADSVKGRFTISRDNSKNTLYLQMNSLRAEDTAVYYCTRYWPMDIWGQGTLVTVSS

SEQ ID NO: 1193 - protein, 115 aa, Synthetic construct
EVQLLESGGGLVQPGGSLRLSCAASGFTFSSYAMNWVRQAPGKGLEWVSAISDSGGFVYYADSVKGRFTISRDNSKNTLYLQMNSLRAEDTAVYYCARYWPMDSWGQGTLVTVSS

SEQ ID NO: 1194 - protein, 115 aa, Synthetic construct
EVQLLESGGGLVQPGGSLRLSCAASGFTFSSYAMNWVRQAPGKGLEWVSAIGGSGGSTYYADSVKGRFTISRDNSKNTLYLQMNSLRAEDTAVYYCARYWPMSLWGQGTLVTVSS

SEQ ID NO: 1195 - protein, 115 aa, Synthetic construct
EVQLLESGGGLVQPGGSLRLSCAASGFTFSSYAMNWVRQAPGKGLEWVSACLDSGGSTYYADSVKGRFTISRDNSKNTLYLQMNSLRAEDTAVYYCARYWPMDSWGQGTLVTVSS

SEQ ID NO: 1196 - protein, 122 aa, Synthetic construct
EVQLLESGGGLVQPGGSLRLSCAASGFTFSTYEMNWVRQAPGKGLEWVSWIGPSGGFTFYADSVKGRFTISRDNSKNTLYLQMNSLRAEDTAVYYCAKDKAVAGMGEAFDIWGQGTMVTVSS

SEQ ID NO: 1197 - protein, 86 aa, Synthetic construct
MVSKSSIFICLSLIILLIMSTQIVAREMTSEASASLTQAMNGNNISETKKVGRHLVKGLGKIFKAGKVIYCKTCKTCHGRCDYCCA

SEQ ID NO: 1198 - protein, 86 aa, Synthetic construct
MVSKSSIFISLSLIILLILSTQIVAREMTSELSASLTQAMNGNNISETRKVARKLVKGLGKMWKGGKVIFCHCCKTCHGRCDYCCL

SEQ ID NO: 1199 - protein, 86 aa, Synthetic construct
MVSKSSIFICLSLIILLIISTQIVLREMTSDATATLTQAMNGNNISETKHVGRHLVKGIVKIFKAGKVIYCKTCKTCHGHCDYCCA

SEQ ID NO: 1200 - protein, 86 aa, Synthetic construct
MVSKSSIFICLSIIMLLIMSTQIVAREMTSEASASLTQAMNGNNISETKKVVRHLVKGLGKIFKAGKVIYCRTSKTCHGRCDYCCA

SEQ ID NO: 1201 - protein, 86 aa, Synthetic construct
MVSKSSIFICLSLIILLIMSTQIVAREMTSEASASLTQAMNGNNISETKKVGRHLVKGLGKIFHMGRVIYCKTCKTCHGRCDYCCA

SEQ ID NO: 1202 - protein, 120 aa, Synthetic construct
EVQLVESGGGLVRPGGSLRLSCAASGFTFTSYAMNWVRQAPGKGLEWVSSISSYSSYIYIADSVKGRFTLSRDNAKNSLYLQMHSLRPEDTAVYFCAREGYSAYSYFDFWGRGTLVTVSS

SEQ ID NO: 1203 - protein, 115 aa, Synthetic construct
EVQLVESGGGLVQPGGSLRLSCAASGFTFSTYAMHWVRQAPGKGLEWVSSISGRGRNSDHADSVKGRFTISRDNSKNTLYLQMNSLRAEDTAVYYCARTEYFHHWGQGTLVTVSS

SEQ ID NO: 1204 - protein, 116 aa, Synthetic construct
EVQLVESGGGLVQPGGSLRLSCAASGFIFSTYWMNWVRQAPGKGLEWVANVNHDGSEEYYVDSVKGRFTISRDNAQNSLYLQMDRLRAEDTAMYFCARRAGLFDSWGQGTLVTVSS

SEQ ID NO: 1205 - protein, 120 aa, Synthetic construct
EVQLVESGGGLVQPGGSLRLSCAVSGFTFSNYAMNWVRQAPGKGLEWVSVISDSGRSTYYADSVKGRFTISRDNSKNTLYLQMNSLRAEDTAVYFCAKRYNWNLHYFDYWGQGTTVTVSS

SEQ ID NO: 1206 - protein, 115 aa, Synthetic construct
EVQLVESGGGLVQPGGSLRLSCAASGFTFSTYAMHWVRQAPGKGLEWVSSISGRGRNSDHADSVKGRFTISRDNSKNTLYLQMNSLRAEDTAVYYCARTEYFHHWGQGTTVTVSS

SEQ ID NO: 1207 - protein, 124 aa, Synthetic construct
QVQLQESGGGLVQPGGSLRLSCAASGFTFSGYAMNWVRQAPGKGPEWVSAINSGGGSTSYADSVKGRFTISRDNAKNTVYLQMNSLKPEDTAVYYCHARDIYSDFLGQYEYDYWGQGTQVTVSS

SEQ ID NO: 1208 - protein, 121 aa, Synthetic construct
EVQLLESGGGLVQPGGSLRLSCAASGFTFSSYAMNWVRQAPGKGLEWVSTISGGGANTYYADSVKGRFTISSDNSKSTLYLQMNSLRAADTAVYHCAKGGMGGYYYGMDVWGQGTTVTVSS

SEQ ID NO: 1209 - protein, 121 aa, Synthetic construct
EVQLLESGGGLVQPGGSLRLSCAASGFTFSSYAMNWVRQAPGKGLEWVSTISGGGANTYYADSVKGRFTISRDNSKSTLYLQMNSLRAEDTAVYHCAKGGMGGYYYGMDVWGQGTTVTVSS

SEQ ID NO: 1210 - protein, 121 aa, Synthetic construct
EVQLLESGGGLVQPGGSLRLSCAASGFTFSSYAMNWVRQAPGKGLEWVSTISGGGANTYYADSVKGRFTISSDNSKSTLYLQMNSLRAEDTAVYHCAKGGMGGYYYGMDVWGQGTTVTVSS

SEQ ID NO: 1211 - protein, 121 aa, Synthetic construct
EVQLLESGGGLVQPGGSLRLSCAASGFTFSSYAMNWVRQAPGKGLEWVSTISGGGANTYYAESVKGRFTISSDNSKSTLYLQMNSLRAEDTAVYHCAKGGMGGYYYGMDVWGQGTTVTVSS

SEQ ID NO: 1212 - protein, 121 aa, Synthetic construct
EVQLLESGGGLVQPGGSLRLSCAASGFTFSSYAMNWVRQAPGKGLEWVSTISGGGANTYYADSVKGRFTISSDNSKSTLYLQMNSLRAADTAVYYCAKGGMGGYYYGMDVWGQGTTVTVSS

SEQ ID NO: 1213 - protein, 121 aa, Synthetic construct
EVQLLESGGGLVQPGGSLRLSCAASGFTFSSYAMNWVRQAPGKGLEWVSTISGGGANTYYADSVKGRFTISSDNSKSTLYLQMNSLRAEDTAVYYCAKGGMGGYYYGMDVWGQGTTVTVSS

SEQ ID NO: 1214 - protein, 121 aa, Synthetic construct
QVQLLESGGGLVQPGGSLRLSCAASGFTFSSYAMNWVRQAPGKGLEWVSTISGGGANTYYADSVKGRFTISRDNSKSTLYLQMNSLRAADTAVYHCAKGGMGGYYYGMDVWGQGTTVTVSS

SEQ ID NO: 1215 - protein, 121 aa, Synthetic construct
QVQLLESGGGLVQPGGSLRLSCAASGFTFSSYAMNWVRQAPGKGLEWVSTISGGGANTYYAESVKGRFTISSDNSKSTLYLQMNSLRAEDTAVYHCAKGGMGGYYYGMDVWGQGTLVTVSS

SEQ ID NO: 1216 - protein, 121 aa, Synthetic construct
QVQLLESGGGLVQPGGSLRLSCAASGFTFSSYAMNWVRQAPGKGLEWVSTISGGGANTYYADSVKGRFTISRDNSKSTLYLQMNSLRAEDTAVYYCAKGGMGGYYYGMDVWGQGTTVTVSS

SEQ ID NO: 1217 - protein, 121 aa, Synthetic construct
QVQLLESGGGLVQPGGSLRLSCAASGFTFSSYAMNWVRQAPGKGLEWVSTISGGGANTYYADSVKGRFTISRDNSKSTLYLQMNSLRAEDTAVYHCAKGGMGGYYYGMDVWGQGTTVTVSS

SEQ ID NO: 1218 - protein, 121 aa, Synthetic construct
QVQLLESGGGLVQPGGSLRLSCAASGFTFSSYAMNWVRQAPGKGLEWVSTISGGGANTYYAESVKGRFTISRDNSKSTLYLQMNSLRAEDTAVYHCAKGGMGGYYYGMDVWGQGTTVTVSS

SEQ ID NO: 1219 - protein, 121 aa, Synthetic construct
QVQLLESGGGLVQPGGSLRLSCAASGFTFSSYAMNWVRQAPGKGLEWVSTISGGGANTYYADSVKGRFTISRDNSKSTLYLQMNSLRAADTAVYYCAKGGMGGYYYGMDVWGQGTTVTVSS

SEQ ID NO: 1220 - protein, 121 aa, Synthetic construct
QVQLLESGGGLVQPGGSLRLSCAASGFTFSSYAMNWVRQAPGKGLEWVSTISGGGANTYYAESVKGRFTISRDNSKSTLYLQMNSLRAEDTAVYHCAKGGMGGYYYGMDVWGQGTLVTVSS

SEQ ID NO: 1221 - protein, 118 aa, Synthetic construct
QVQLQQPGTELVRPGTSVKLSCKASGYIFTTYWMNWVKQRPGQGLEWIGMIHPSASEIRLDQKFKDKATLTLDKSSSTAYMHLSGPTSVDSAVYYCARSGEWGSMDYWGQGTSVTVSS

SEQ ID NO: 1222 - protein, 119 aa, Synthetic construct
EVQLVESGGGLVQPGGSLRLSCAASGFTFSTYSMNWVRQAPGKGLEWISYISRSSRTINHADSVKGRFTVSRDNAKNSLYLQMISLRDEDTAVYYCARKAAAGPFDYWGQGTLVTVASA

SEQ ID NO: 1223 - protein, 114 aa, Synthetic construct
QVQLVQSGGGLVQPGGSLRLSCAASGFTFSSYAMNWVRQAPGKGLEWVSTISGSGGSTYYADSVKGRFTFSRDNSKNTLYLQMNNLRAEDTAVYYCAKVGGDVWGQGTTVTVSS

SEQ ID NO: 1224 - protein, 113 aa, Synthetic construct
QVQLVESGGGLVQPGGSLRLSCAASGFTFSSYAMNWVRQAPGKGLEWVSTISGSGGSTYYPDSVKGRFTISRDNSKNTLYLQMNSLKAEDTAVYYCAKVGGDVWGQGTTVMFS

SEQ ID NO: 1225 - protein, 114 aa, Synthetic construct
EVQLVESGGGLVQPGGSLRLSCAASGFTFSSYAMNWVRQAPGKGLEWVSTISGSSGSTYYADSVKGRFTISRDNSKNTLYLQMNSLTAEDTAVYYCAKVGGDVWGQGTTVTVSS

SEQ ID NO: 1226 - protein, 120 aa, Synthetic construct
QVQLVQSGAEVKKPGSSVKVSCKVSGGIFSTYAINWVRQAPGQGLEWMGGIIPIFGTANHAQKFQGRVTITADESTSTAYMELSSLRSEDTAVYYCARDQGIAAALFDYWGQGTLVTVSS

SEQ ID NO: 1227 - protein, 124 aa, Synthetic construct
QVQLVESGGGVVQPGRSLRLSCAASGFTFSSYPLHWVRQAPGKGLEWVSFISYDGSEKYYASSVKGRFTISRDNSENTLYLQMNSLRPEDTAVYYCARNRGDIYYDFTYAMDIWGQGTMVTVSS

SEQ ID NO: 1228 - protein, 124 aa, Synthetic construct
EVQLVESGGGVVQPGRSLRLSCAASGFTFSNYPMHWVRQAPGKGLEWVAVISYDGSEKWYADSVKGRFTISRDNSKNTLYLEMNSLRPEDTAVYYCARNRGDIYYDFTYAMDIWGQGTTVTVSS

SEQ ID NO: 1229 - protein, 124 aa, Synthetic construct
EVQLVESGGGVVQPGRSLRLSCAASGFTFSNYPMHWVRQAPGKGLEWVAVISYDGSEKWYADSVKGRFTISRDNSKNTLYLEMNSLRPEDTAVYYCARNRGDIYYDFTYAMDYWGQGTTVTVSS

SEQ ID NO: 1230 - protein, 119 aa, Synthetic construct
EVQLLESGGGLVQPGGSLRLSCAASGFTFSTYAMSWVRQAPGKGLEWVSAIRGNGVNTYYGDSMKGRFTISRDNSKDTLYLQMNSLRAEDTAVYYCAKNKWELLVFEYWGQGTLVTVSS

SEQ ID NO: 1231 - protein, 121 aa, Synthetic construct
EVQLLESGGGLVQPGGSLRLSCAASGFTFSSYAMNWVRQAPGKGLEWVSTISGSGDNTYYADSVKGRFTISRDNSKNTLYLQMNSLRAEDTAVYYCAKKFVLMVYAMLDYWGQGTLVTVSS

SEQ ID NO: 1232 - protein, 121 aa, Synthetic construct
EVQLLESGGGLVQPGGSLRLSCAASGFTFSSYAMNWVRQAPGKGLEWVSTISGSGGNTYYADSVKGRFTISRDNSKNTLYLQMNSLRAEDTAVYYCAKKFVLMVYAMLDYWGQGTLVTVSS

SEQ ID NO: 1233 - protein, 120 aa, Synthetic construct
EVQLVESGGGLVKPGGSLRLSCAASGFTFSTYSMNWVRQAPGKGLEWVSSISSSGDYIYYADSVKGRFTISRDNAKNSLYLQMNSLRAEDTAVYYCARDLVTSMVAFDYWGQGTLVTVSS

SEQ ID NO: 1234 - protein, 123 aa, Synthetic construct
QVQLVESGGGLVQPGGSLRLSCEASGFPFSSYAMNWVRQAPGKGLEWVSGINFRGGLTYYADSVKGRFTISRDDSTNTLYLQVNSLRAEDTAVYYCAKDGSGTHYLNWYFDVWGRGTLVTVSS

SEQ ID NO: 1235 - protein, 124 aa, Synthetic construct
QVQLVESGGGLVQPGGSLRLSCEASGLHFRNYAMNWVRQAPGKGLEWVAFISGSGETPLYADSVKGRFTVSRDNSRNTLYLQMKSLSAEDTAVYYCAKMYGDENSSGLDAFDVWGQGTMVTVSS

SEQ ID NO: 1236 - protein, 129 aa, Synthetic construct
EVQLVESGGGLVQPGGSLRLSCAASGFTFSSYAMNWVRQAPGKGLEWVSVISGSGGWRNYADSVKGRITISRDNSKNTLYLQMNNLRAEDTAVYYCAKDRGATFGVVILGPPYYGMDVWGQGTTVTVSS

SEQ ID NO: 1237 - protein, 118 aa, Synthetic construct
EVQLVESGGGLVQPGGSLRLSCAASGFTSSSYAMNWVRQAPGKGLEWVSTISGMGGSTYYADSVKGRFTISRDNSKNTLYLQMNSLRAEDTAVYYCAKRGYPHSFDIWGQGTMVTVSS

SEQ ID NO: 1238 - protein, 127 aa, Synthetic construct
EVQLVESGGGLVQPGGSLRLSCAASGFTFSTYEMNWVRQAPGKGLEWVSYSSSSGRTIYYADSVKGRFTISRDNAKNSLFLQMNSLRAEDTAVYYCARPSSIETLLRNQYHYGVDVWGQGTTVTVSS

SEQ ID NO: 1239 - protein, 111 aa, Synthetic construct
EVQLVESGGGLVKPGGSLKLSCAASGFTFSTYAMSWVRQTPEKRLEWVAGISSGGSYTYYPETMKGRFTISRDNARNTLYLQMSSLRSEDTAIYYCTRGSWGQGTSVTVSS

SEQ ID NO: 1240 - protein, 117 aa, Synthetic construct
EVKLVESGGGLVRPGGSLKLSCAASGFTFSSYAMNWVRQTPEKRLEWVASISSGGNIYYSDSVKGRFTISRDNARNTLHLQMSSLRSEDTAMYYCARDGYLYAMDYWGQGTSVTVSS

SEQ ID NO: 1241 - protein, 118 aa, Synthetic construct
QVQLKESGPGLVAPSQSLSITCTVSEFSLTGSSVNWVRQPPGKGLEWLGMIWGDGRIDYNSALKSRLSISKDNSKSQVFLKMNSLQTDDTARYYCARDGYYPYAMNYWGQGTSVTVSS

SEQ ID NO: 1242 - protein, 119 aa, Synthetic construct
EVQLVESGGGLVQPGGSLRLSCTVSGFSLNTYYMNWVRQAPGKGLEWVGIIAPDDTTYYASWAKSRSTISRDTSKNTVYLQMNSLRAEDTAVYYCARSGDTTAWGADIWGQGTLVTVSS

SEQ ID NO: 1243 - protein, 119 aa, Synthetic construct
EVQLVESGGGLVQPGGSLRLSCTASGFSLNTYYMNWVRQAPGKGLEWVGIIAPDDTTYYASWAKSRFTISRDTSKNTVYLQMNSLRAEDTAVYYCARSGDTTAWGADIWGQGTLVTVSS

SEQ ID NO: 1244 - protein, 121 aa, Synthetic construct
EVQLLESGGGLVQPGGSLRLSCAASGFTFSTYAMSWVRQAPGKGLEWVSAISGSGGSTYYADSVKGRFTISRDNSKNTLYLQMNSLRAEDTAVYYCAKTPSSIYAAGMDVWGQGTTVTVSS

SEQ ID NO: 1245 - protein, 120 aa, Synthetic construct
EVQLVESGGGLVKPGGSLRLSCAASGFTFSTYSMNWVRQAPGKGLEWVSSISSSGDYIYYADSVKGRFTISRDNAKNSLFLQMNSLKAEDTAVYYCARDLVTSMVAFDYWGQGTLVTVSS

SEQ ID NO: 1246 - protein, 117 aa, Synthetic construct
EVQLVESGGDLVKPGGSLRLSCESSGFIFSQYAMNWVRQAPGKGLQWVAYIGGAGFITYHADDVKGRFTISRDNAKNTLYLQMNSLTINDTAVYYCVRSNSRIPDYWGQGTLVAVSS

SEQ ID NO: 1247 - protein, 148 aa, Synthetic construct
MASKRITKELKDLQKDPPVSCSAGPVGEDLFHWQATIMGPADSPYAGGVFLVTIHFPPDYPFKPPKVSFRTKVFHPNINSNGSICLDILKEQWSPALTVSKVLLSICSLLTDPNPDDPLVPDIAHMYKTDKAKYETTARSWTQKYAMN

SEQ ID NO: 1248 - protein, 148 aa, Synthetic construct
MAAKRITKELQDLQRDPPISCSTGPVGDDLFHWQATIMGPVDSPYAGGVFFIVIHFPPDYPFKPPKVTFKTKVYHPNVNSNGSICLDILKEQWSPALTVSKVLLSICSLLTDPNPDDPLVPEIAHIYKSQRARYEETARAWTQKYAMN

SEQ ID NO: 1249 - protein, 140 aa, Synthetic construct
ELQDLQRDPPTSCSAGPVGEDLFHWQATIMGPTESPYAGGVFFVMIHFPPDYPFKPPKVNFQTKVYHPNINSNGSICLDILKEQWSPALTISKVLLSICSLLTDPNPDDPLVPEIAHIYKSQRSRYEETARAWTQKYAMN

SEQ ID NO: 1250 - protein, 148 aa, Synthetic construct
MASKRITKELKDLQKDPPVSCSAGPVGDDMFHWQATIMGPADSPYAGGVFLVNIHFPPDYPFKPPKVSFKTKVFHPNIYNNGSICLDILKEQWSPALTVSKVLLSICSLLTDPNPDDPLMPEIAHMYKSDRAKYENTARSWTQKYAMN

SEQ ID NO: 1251 - protein, 121 aa, Synthetic construct
DNISTTLNKCIPVTYAKNMTDDKKNKLYIRWPDLLVGEANCKKDQKFWKNEYEKHGSCCEKSYNQEQYFDLAMGLKDKFDLSNSLGRYGIIPGKSYPVQTINNTVKAITQGFPRLACTDLM

SEQ ID NO: 1252 - protein, 119 aa, Synthetic construct
QSVEESGGRLVTPGTPLTLTCTVSGFSLSTYTMNWVRQAPGKGLEYIGFISSSSSIDYVSWAKGRFTISKTSTTVDLKITSPTTEDTATYFCARDFYADYIGGGYPYIWGPGTLVTVSS

SEQ ID NO: 1253 - protein, 114 aa, Synthetic construct
GAELVRPGSSVKISCKASGYTFSTYWMNWVKQRPGQGLEWIGQIYPGDGDTNYNGKFKGKATLTADKSSSTAYMQLSSLTSDDSAVYFCARSMVTNYYFAMDYWGQGTSVTVSS

SEQ ID NO: 1254 - protein, 120 aa, Synthetic construct
QVQLVQSGHEVKQPGASVKVSCKASGYSFTTYGMNWVPQAPGQGLEWMGWFNTYTGNPTYAQGFTGRFVFSMDTSASTAYLQISSLKAEDMAMYYCARWYNRNHDYFDYWGQGTLVTVSS

SEQ ID NO: 1255 - protein, 125 aa, Synthetic construct
QVQLVQSGHEVKQPGASVKVSCKASGYSFTTYGMNWVPQAPGQGLEWMGWFNTYTGNPTYAQGFTGRFVFSMDTSASTAYLQISSLKAEDMAMYYCARYAYCGGDCYSYWYFDLWGRGTLVTVSS

SEQ ID NO: 1256 - protein, 129 aa, Synthetic construct
QVQLVQSGHEVKQPGASVKVSCKASGYSFTTYGMNWVPQAPGQGLEWMGWFNTYTGNPTYAQGFTGRFVFSMDTSASTAYLQISSLKAEDMAMYYCARYAYCGGDCYSDYYYYYGMDVWGQGTTVTVSS

SEQ ID NO: 1257 - protein, 132 aa, Synthetic construct
QVQLVQSGHEVKQPGASVKVSCKASGYSFTTYGMNWVPQAPGQGLEWMGWFNTYTGNPTYAQGFTGRFVFSMDTSASTAYLQISSLKAEDMAMYYCARYYYDYVWGSYAYTDYYYYYGMDVWGQGTTVTVSS

SEQ ID NO: 1258 - protein, 122 aa, Synthetic construct
QVQLVQSGHEVKQPGASVKVSCKASGYSFTTYGMNWVPQAPGQGLEWMGWFNTYTGNPTYAQGFTGRFVFSMDTSASTAYLQISSLKAEDMAMYYCARYDYGGNSAEYFQHWGQGTLVTVSS

SEQ ID NO: 1259 - protein, 127 aa, Synthetic construct
QVQLVQSGHEVKQPGASVKVSCKASGYSFTTYGMNWVPQAPGQGLEWMGWFNTYTGNPTYAQGFTGRFVFSMDTSASTAYLQISSLKAEDMAMYYCARCGYSGYDYDYYYYYGMDVWGQGTTVTVSS

SEQ ID NO: 1260 - protein, 121 aa, Synthetic construct
QVQLVQSGHEVKQPGASVKVSCKASGYSFTTYGMNWVPQAPGQGLEWMGWFNTYTGNPTYAQGFTGRFVFSMDTSASTAYLQISSLKAEDMAMYYCARYGYSSGYDYFDYWGQGTLVTVSS

SEQ ID NO: 1261 - protein, 118 aa, Synthetic construct
QVQLVQSGHEVKQPGASVKVSCKASGYSFTTYGMNWVPQAPGQGLEWMGWFNTYTGNPTYAQGFTGRFVFSMDTSASTAYLQISSLKAEDMAMYYCARSNWGDYFDYWGQGTLVTVSS

SEQ ID NO: 1262 - protein, 120 aa, Synthetic construct
EVQLVQSGAEVKKPGASVKVSCKVSGHSLSELTIHWVRQAPGKGLEWMGGFDPEDGRGTYAPNFRGRVTMTEDTSTDTAYMELSGLRSEDAAVYYCATLLGEYDSYFDLWGRGTLVTVSS

SEQ ID NO: 1263 - protein, 111 aa, Synthetic construct
QVQLQDSGGGLVQSGGSLRLACAASGRIVSTYAMGWFRQSPGKEREFVATVKGRFTISRDNAKNTLYLQMNSLKPEDTAVYYCAKTKRTGIFTTARMVDYWGQGTQVTVSS

SEQ ID NO: 1264 - protein, 108 aa, Synthetic construct
QSVEESGGRLVTPGTPLTLTCTVSGFSLSTYAMSWVRQAPGKGLEWIGIVGKSGIIKYASWAKGRFTISKTSTTVDLKMTSLTTEDTAIYFCARLWSLWGQGTLVTVS

SEQ ID NO: 1265 - protein, 124 aa, Synthetic construct
EVQLLESGGGLVQPGGSLRLSCAASGFTFSTYAMSWVRQAPGKGLEWVSTITSSGGATYHADSVKGRLTISRDNSKNTLYLEMNSLRVEDTAVYYCAKDWGRTVYAVIKDLDIWGQGTLVTVSS

SEQ ID NO: 1266 - protein, 126 aa, Synthetic construct
QVQLVQSGSELRRPGASVNISCKASGYGFNTYAMNWVRQAPGQGPEWMGWINTDTGDPTYAQGFTGRFAFFLDTSASTAFLQITRLTGEDTAVYFCARTRNNWNGVYYHYSGLDVWGQGTTVTVSS

SEQ ID NO: 1267 - protein, 129 aa, Synthetic construct
QVQLVESGGGVVQPGRSLRLSCAASGFTFSTYAMHWVRQAPGKGLEWVAVISYDANYKYYADSVKGRFTISRDNSKNTLYLQMNSLRAEDTAVYYCAKDSQLRSLLYFEWLSQGYFDYWGQGTLVTVSS

SEQ ID NO: 1268 - protein, 136 aa, Synthetic construct
MRFMKNYGRVAHSALAYAMNDEFSRVLHHQMEFFSSNPSADTLNRLRGEVSEIHTVMVDNIEKILDRGDRISLLVDKTSTMQDSAFHFRKQSKRLRRALWMKNAKLLAVLTVAIVVLLYLLISAFCGGLSLPSCRS

SEQ ID NO: 1269 - protein, 135 aa, Synthetic construct
MAMRVVRNLDLERYAGRWYEIACFPSAFQPKTGTNTRATYALNPDGTVRVLNETWTDGRRGHIEGTAWRADPAGDEAKLRVRFFVPPFLPVFPVTGDYWVLHVDADYQYALVGQPSRKYLWVRARRSLPNSPPNC

SEQ ID NO: 1270 - protein, 118 aa, Synthetic construct
NTIYGAATGGADVWINERRFRVIRQIGEGGLAFVYLVKEQQPASDAAPAKRHDAHVSEDGTYAMKKVLIQSKEQLDLVKEEIRVSSLFNHPNLFPLLDHAIITVKVIYFALFFFFACA

SEQ ID NO: 1271 - protein, 135 aa, Synthetic construct
MAMRVVRNLDLERYVGRWYEIACFPSAFQPKTGTNTRATYALNPDGTVRVLNETWTDGRRGHIEGTAWRADPAGDEAKLRVRFFVPPFLPVFPVTGDYWVLHVDADYQYALVGQPSRKYLWVRARRSLPNSPPNC

SEQ ID NO: 1272 - protein, 123 aa, Synthetic construct
EVQLQASGGGLVQSGDSLRLSCAASGRTFSTYAMGWFRQAPGKLREFVGVISSSGYTHYTNSVRGRFTISRDNAKNMVYLQMNSLKPEDTAVYYCAAADRRFIATDGKQYDYWGQGTQVTVSS

SEQ ID NO: 1273 - protein, 114 aa, Synthetic construct
EVQLLESGGGLVQPGGSLRLSCAASGFTFSNYAMNWVRQAPGRGLEWVSAIHYDGSNSYYADSVKGRFTISRDNSKNTLYLQMNSLRAEDTAIYYCAILSRVYWGQGTLVTVSS

SEQ ID NO: 1274 - protein, 98 aa, Synthetic construct
QVQLVQSGSELKKPGASVKVSCKASGYTFTSYAMNWVRQAPGQGLEWMGWINTNTGNPTYAQGFTGRFVFSLDTSVSTAYLQISSLKAEDTAVYYCAR

SEQ ID NO: 1275 - protein, 123 aa, Synthetic construct
QVQLVQSGAEVKKPGSSVKVSCKTSGGTLSNYAISWVRQAPGQGLEWMGGTIPTLGMSTYAPNFQGRVAITADKSTSTAYMELSSLRSDDTAVYYCATMGSADTSFYFYMDVWGKGTTVTVSS

SEQ ID NO: 1276 - protein, 104 aa, Synthetic construct
MPCAAVGSLWQHLMIQDRAERQADHLKEKAGEFQVAYTNGGIDWEDVAGSTEATLAMNAQLLDLVHKMPDCPARRLTVEMLEAARADYVARKLREYVAAQRKVA

SEQ ID NO: 1277 - protein, 60 aa, Synthetic construct
EVQLLNNSFTAINLNNNANSQIVSINNGSATMNYYAQYYATGAATAGSVNSSVQYSMTYQ

SEQ ID NO: 1278 - protein, 141 aa, Synthetic construct
MPLQHLIYVSTARQELSHAEQEALLESCVRHNLQNDISGVLLYGPGNFIQVLEGEAAAVAETYQRILDDPRHHNLIEILLEDIEQRSFSNWRMGFTRLDDDTISKHPGFIDVYGPDFLPQRLAQRPTLAMNILLSFRANCR

SEQ ID NO: 1279 - protein, 119 aa, Synthetic construct
EVQLVQSGTEVKKPGASVKVSCKASGYTFTTYAMHWVRQAPGQSLEWMGWINTGNGNTKYSQNFQGRVTMTRDTSISTAYMELSRLRSDDTAVYYCARDLGQLERLYFWGQGTLVTVSS

SEQ ID NO: 1280 - protein, 103 aa, Synthetic construct
MAKKRKSVATRLDEVDRTMYSTFCSTANSLSHLYTHAMNQQKLSFQAGERHALEKLYQWILRQQQEGSRVATIDIVTHLQNELFNNPGGARTFPQKRIKGPGF

SEQ ID NO: 1281 - protein, 112 aa, Synthetic construct
MSESDDCLFCKIIAGQIPSSKVYEDETTYAFNDINPKAKVHVLVVPKKHYANVAELAADDPTELAHIVSIAQNIADKEFHGAYRLVFNTGLDAGQTVFHVHAHVMTGEKLDE

SEQ ID NO: 1282 - protein, 112 aa, Synthetic construct
MSESDDCLFCKIIAGQIPSSKVYEDETTYAFNDINPKAKVHVLVVPKKHYANVAELAAGDPTELAHIVSIAQNIADKEFHGAYRLVFNTGLDAGQTVFHVHAHVMTGEKLDE

SEQ ID NO: 1283 - protein, 119 aa, Synthetic construct
EVKLVESGGGLVKPGGSLKLSCAASGFTFSTYAMSWVRQTPEKRLEWVASITSGGTTYYTDSVKGRFTISRDNARNILYLQMSSLRSEDTAMYYCARDGNFYYYGMDYWGQGTSVTVSS

SEQ ID NO: 1284 - protein, 110 aa, Synthetic construct
QVQLVQSGHEVKQPGASVKVSCKASGYSFTTYGMNWVPQAPGQGLEWMGWFNTYTGNPTYAQGFTGRFVFSMDTSASTAYLQISSLKAEDMAMYYCARYWGQGTLVTVSA

SEQ ID NO: 1285 - protein, 108 aa, Synthetic construct
VQLVQSGSELKKPGASVKVSCKASGYTFTSYAMNWVRQAPGQGLEWMGWINTNTGNPTYAQGFTGRFVFSLDTSVSTAYLQISSLKADDTAVYYCAREDSNGYKIFDY

SEQ ID NO: 1286 - protein, 118 aa, Synthetic construct
QSLEESGGRLVTPGTPLTLTCTVSGFDLSTYAMSWVRQAPGKGLEWIGAVSATTGNTYYATWAKGRFTMSKASTTVDLKITSPTTEDTATYFCVRYASSGVGTYFDLWGQGTLVTVSS

SEQ ID NO: 1287 - protein, 118 aa, Synthetic construct
EVQLVESGGGLVQPGGSLRLSCAASGFTFSTYAMSWVRQAPGKGPEWVSRISSGGGSTNYADSVKGRFTISRDNAKKTLYLQMKSLKPEDTAVYYCANRAGWGMGDYWGQGTQVTVSS

SEQ ID NO: 1288 - protein, 121 aa, Synthetic construct
QVQLVESGGGLVQPGGSLRLSCAASGFTFSSYAMNWVRQAPGKGLEWVSGISSWGSSTYYADSVKGRFTISRDNSKNTLYLQMNSLRAEDTAVYYCAREDGSYMTDYFAYWGQGTLVTVSS

SEQ ID NO: 1289 - protein, 123 aa, Synthetic construct
QVQLVESGGGLVQPGGSLRLSCAASGFTFSSYAMNWVRQAPGKGLEWVSHIRKKNTSYTTEYAASVKGRFTISRDNSKNTLYLQMNSLRAEDTAVYYCAREDGSYMTDYFAYWGQGTLVTVSS

SEQ ID NO: 1290 - protein, 120 aa, Synthetic construct
QVQLVESGGGLVQPGGSLRLSCAASGFTFSSYAMNWVRQAPGKGLEWVSNIQRVGSTYYADSVKGRFTISRDNSKNTLYLQMNSLRAEDTAVYYCAREDGSYMTDYFAYWGQGTLVTVSS

SEQ ID NO: 1291 - protein, 119 aa, Synthetic construct
QVQLVQSGAEVKKPGASVKVSCKASGYTFTTYTMNWVRQAPGQGLEWMGYIIPSSGYVDYNQKFKGRVTMTRDTSTSTVYMELSSLRSEDTAVYYCVRSLDGYFWFAYWGQGTLVTVSS

SEQ ID NO: 1292 - protein, 145 aa, Synthetic construct
MPMEFGLSWVFLVALLRGVQCQVQLVESGGGVVQPGRSLRLSCAASGFSFSTYAMHWVRQAPGMGLEWVAVMSYDGTTEYIADSVKGRFTISRDNSKNTLYMQMNSLRPEDTAVYYCARNGVPYYASGGGWIDPWGQGTPVTVSS

SEQ ID NO: 1293 - protein, 143 aa, Synthetic construct
MEFELSWVFLVTLLRGVQCQVSLEESGGAVVHPGNSLRLSCSASGLGFNTYAMHWARQAPGRGPEWVAGISFDEFHREYADAVRGRFTVSRGSSKNILLLQMEGLTAEDTAVYYCTLSQTESESDIFNGLDYWGRGTLVTVSS

SEQ ID NO: 1294 - protein, 122 aa, Synthetic construct
EVQLLESGGDFVQPGGSLRLSCAVSGFTFSNYAMNWVRQAPGKGLEWVSSIINSGDNTYYADSVKGRFTISRDNSKNTLYLQMNSLRVEDTAIYYCAKAARHSLTTLRFDNWGQGTLVTVSS

SEQ ID NO: 1295 - protein, 124 aa, Synthetic construct
EVQLLESGGGLVKPGGSLTLSCAASGFSFGNYAMNWVRQAPGKGLEWVSGIVGIGISKYYADSVKGRFTISRDNLNNTLYLEMNSLRAEDTAVYYCVKVCPRCGREWHDALDIWGQGTMVTVSS

SEQ ID NO: 1296 - protein, 125 aa, Synthetic construct
EVQLLESGGDLVQPGGSLRLSCVASGFILSDYAMNWVRQAPGKGLEWVSALTGSGDSTHYADSVKGRFTISRDTSKNTLYLQMNSLRVEDTAVYYCANNPHYDAGSPHRASEDYWGQGTLVTVSS

SEQ ID NO: 1297 - protein, 125 aa, Synthetic construct
EVQLVGSGGGLVKPGESLRLSCAASGFTFSNYAMNWVRQAAGKRPEWVSIITGSGADTYYPQSMRGRFTISRDNSQNTVYLQMNSLRVEDTAVYYCAKGTQFSCSSTRCYPLDYWGQGTLVTVSS

SEQ ID NO: 1298 - protein, 120 aa, Synthetic construct
EVQLLESGGGLVQPGGSLRLSCAASGFTFSSYAMNWVRQAPGKGLEWVSFISGGSAKTFYADSVKGRFTISRDNSKDTLYLQMNSLRADDTAVYFCAKMTTVVLESIDSWGQGTLVTVSS

SEQ ID NO: 1299 - protein, 120 aa, Synthetic construct
EVKLVESGGSLVQPGGSLKLSCAASGFNFNTYAMSWVRQTPEKRLEWVAYISNGGGNTYYVDTVKGRFTISRDNAKNTLYLRMSSLKSEDTAMYYCARHGLYWGYSMDYWGQGTSVTVSS

SEQ ID NO: 1300 - protein, 116 aa, Synthetic construct
EVQLLESGGGLVQPGGSLRLSCAASGFTFSSYAMNWVRQAPGKGLEWVSTTSGSGASTYYADSVKGRFTISRDNSKNTLYLQMNSLRAEDTAVYYCAKIWIAFDIWGQGTMVTVSS

SEQ ID NO: 1301 - protein, 120 aa, Synthetic construct
QVQLVESGGGVVQPGRSLRLSCAASGFSFSTYAMHWVRQAPGKGLEWVAVISYDGDNKYSADSVKGRFTISRDNSKNTLYLQMNSLRAEDTAVYYCARGRKLGIDAFDIWGQGTMVTVSS

SEQ ID NO: 1302 - protein, 124 aa, Synthetic construct
EVQLLESGGGLVQPGGSLRLSCAASGFTFSSYAMNWVRQAPGKGLEWVSGISGSGGHTYHADSVKGRFTISRDNSKNTLYLQMNSLRAEDTAVYYCAKDRYDILTGYYNLLDYWGQGTLVTVSS

SEQ ID NO: 1303 - protein, 119 aa, Synthetic construct
QSLEESGGRLVTPGTPLTLTCTVSGFSLSTYTMNWVRQSPGKGLEWIGAISYDGGTAYANWAKGRFTISKTSTTVDLQIASPTTEDTATYFCARGFYVYAYIGDAFDPWGPGTLVTVSS

SEQ ID NO: 1304 - protein, 122 aa, Synthetic construct
EVQLVESGGGLVQPGGSLRLSCTVSGFSLSTYTMNWVRQAPGKGLEWVGAISYDGGTAYANWAKGRFTISRDNSKNTLYLQLNSLRAEDTAVYYCARGFYVYAYIGDAFDPWGQGTLVTVSS

SEQ ID NO: 1305 - protein, 124 aa, Synthetic construct
QVQLVESGGGLVQPGGSLRLSCAASGFTFSNYAMNWVRQTPGKGLEWVSVNYNDGFGTFNGYYADSVKGRFIISRDNSKNTLYLQMNSLRVDDTAVYYCARDSGVAGPYYFDNWGQGTLVTVSS

SEQ ID NO: 1306 - protein, 98 aa, Synthetic construct
EVQLLESGGGLIQPGGSLRLSCAASAFTFNKYAMNWVRQAPGKGLEWVSHISGSGLSTYYADSVKGRFTISRDNSKNTLYLQMNSLRAEDTAVYYCAK

SEQ ID NO: 1307 - protein, 123 aa, Synthetic construct
EVQLLESGGGLIQPGGSLRLSCAASAFTFNKYAMNWVRQAPGKGLEWVSHISGSGLSTYYADSVKGRFTISRDNSKNTLYLQMNSLRAEDTAVYYCAKDLAVTPPAQGYLDRWGQGTLVTVSS

SEQ ID NO: 1308 - protein, 98 aa, Synthetic construct
EVQLLESGGGLVQPGGSLRLSCAASGFTFSSYAMNWVRQAPGKGLEWVSAISGSGGSTYHADSVKGRFTISRDNSKNTLYLQMSSLRAEDTAVYYCAK

SEQ ID NO: 1309 - protein, 119 aa, Synthetic construct
EVQLLESGGGLVQPGGSLRLSCAASGFTFSSYAMNWVRQAPGKGLEWVSAISGSGGSTYHADSVKGRFTISRDNSKNTLYLQMSSLRAEDTAVYYCAKSPASSWYFDHWGQGTLVTVSS

SEQ ID NO: 1310 - protein, 131 aa, Synthetic construct
VPNAFNPSFLSFNLPSGNVSQSFAPFFTQQVGMTYAGNREIEERVVADVASFGRQIGRLLDGVLLLARDRPEPEFATLRTMAAEIKRVKEETRSSALRDARAALDALARADPKGLAVLLEGYAPPVPRGSP

SEQ ID NO: 1311 - protein, 120 aa, Synthetic construct
EVQLVETGGGLVRPGGSLRLSCAASGLTFSTFAMNWVRQAPGKGLEWVSSISGSGGSTYYADSVKGRFTISRDNAKNTVYLQMNSLRAEDTAVYYCARDFNWDSGTMDLWGQGTTVTVSP

SEQ ID NO: 1312 - protein, 121 aa, Synthetic construct
EVQLLESGGGLVQPGGSRRLSCATSGLSFSSYAMNWVRQAPGKGLEWVSAISGSGDITHYADSVKGRLTISRDNSKNTVYLQMNSLRGEDTAVYYCAKGPWLAPGGWFDPWGQGTLVTVSS

SEQ ID NO: 1313 - protein, 125 aa, Synthetic construct
EVQLLESGGGLVQPGGSLRLSCAASGFTFSSYAMNWVRQAPGKGLEWVSAISVGGDTYYADSVKGRFTISRDNSKNTLYLQMNSLRAEDTAVYYCAKDQVTMVRGVWYYYGLDVWGQGTTVTVSS

SEQ ID NO: 1314 - protein, 125 aa, Synthetic construct
EVQLLESGGGLVQPGGSLRLSCAASGFTFSSYAMNWVRQAPGKGLEWVSAISVGGDTYYADSVKGRFTISRDNSKNTLYLQVNSLRAEDSAVYYCAKDQVTLVRGVWYYYGLDVWGQGTTVTVSS

SEQ ID NO: 1315 - protein, 125 aa, Synthetic construct
EVQLLESGGALVQPGGSLRLSCAASGFTFSSYAMNWVRQAPGKGLEWVSAISVGGDTYYADSVKGRFTISRDNSKNTLYLQMNSLRAEDTAVYYCAKDQVTMVRGVWYYYGLDVWGQGTTVTVSS

SEQ ID NO: 1316 - protein, 125 aa, Synthetic construct
EVQLLESGGALVQPGGSLRLSCAASGFTFSSYAMNWVRQAPGKGLEWVSAISVGGDTYYADSVKGRFTISRDNSKNTLYLHVNSLSAEDSAVYYCAKDQVTLVRGVWYYYGLDVWGQGTTVTVSS

SEQ ID NO: 1317 - protein, 125 aa, Synthetic construct
EVQLLESGGALVQPGGSLRLSCAASGFTFSSYAMNWVRQAPGKGLEWVSAISVGGGTYYADSVKGRFTISRDNSKNTLYLHVNSLRAEDTAVYYCAKDQVTMVRGVWYYYGLDVWGQGTTVTVSS

SEQ ID NO: 1318 - protein, 125 aa, Synthetic construct
EVQLLESGGALVQPGGSLRLSCAASGFTFSNYAMNWVRQAPGKGLEWVSAISVGGDTYYADSVKGRFTISRDNSKNTLYLHVNSLSAEDSAVYYCAKDQVTLVRGVWYYYGLDVWGQGTTVTVSS

SEQ ID NO: 1319 - protein, 125 aa, Synthetic construct
EVQLLESGGGLVQPGGSLRLSCAASGFTFSSYAMNWVRQAPGKGLEWVSAISVGGDTYYADSVKGRFTISRDNSKNTLYLHVNSLRAEDSAVYYCAKDQVTLVRGVWYYYGLDVWGQGTTVTVSS

SEQ ID NO: 1320 - protein, 135 aa, Synthetic construct
MDWTWRILFLAVAATGAHSQVQLVQSGSELKKPGASVKVSCKASGYTFTSYAMNWVRQAPGQGLEWMGWINTNTGNPTYAQGFTGRFVFSLDTSVSTAYLQICSLKAEDTAVYYCARANWYFDLWGRGTLVTVSS

SEQ ID NO: 1321 - protein, 120 aa, Synthetic construct
QVQLLESGADMVQPGRSLRLSCAASGFNFRTYAMHWVRQAPGKGLEWVAVMSHDGYTKYYSDSVRGQFTISRDNSKNTLYLQMNNLRPDDTAIYYCARGLTGLSVGFDYWGQGTLVTVSS

SEQ ID NO: 1322 - protein, 53 aa, Synthetic construct
QVQLVESGGGLAQPGGSLRLSCAASGFIFNTYAMGWVRQAPGKGLEWVSTVSA

SEQ ID NO: 1323 - protein, 137 aa, Synthetic construct
MGWSSIILFLVATATGVHSQVQLQQPGTELVRPGTSVKLSCKASGYIFTTYWMNWVKQRPGQGLEWIGMIHPSASEIRLDQKFKDKATLTLDKSSSTAYMHLSGPTSVDSAVYYCARSGEWGSMDYWGQGTSVTVSS

SEQ ID NO: 1324 - protein, 116 aa, Synthetic construct
EVQLLESGGGLVKPGGSLRLSCAASGFIFSTYAMTWVRQAPGKGLEWVSSISSSSSYIYYADSVKGRFTISRDNAKNSLYLQMNSLRAEDTAVYYCARDEGVFDYWGQGTLVTVSS

SEQ ID NO: 1325 - protein, 114 aa, Synthetic construct
EVQLVESGGGVVQPGGSLRLSCAASGFTFRTYAMHWVRQAPDKGLEWVAIISDDETHKYYADSVKGRFTISRDNSKNTLFLQINGLRADDSAVYYCAVHDFDFWGQGTLVTVSS

SEQ ID NO: 1326 - protein, 129 aa, Synthetic construct
EVQLVESGGGLVQPGRSLRLSCTASGFSFGDYAMNWVRQAPGKGLEWVGFIRSKTYGGTTEYAASVKGRFTISRDDSKNIAYLQMNSLKTEDTAVYYCTRDPADFYYYSSGQTGWFDPWGQGTLVTVSS

SEQ ID NO: 1327 - protein, 110 aa, Synthetic construct
MPNVKPFKSPNGDVGVDGMISVIGHELAELASNPLANAWYAGGDPSFPVEIADLCEGIYGTGGGGSYTGQVLDDRDGATYNMNGIRRKFLVQWLWSHVLNYCTGPNALDH

SEQ ID NO: 1328 - protein, 121 aa, Synthetic construct
EVQLVESGGGLVNPGGSLRLSCTASGFSFSTYSMNWVRQAPGKGLEWVSLITSSGSYIYYADSVKGRFTISRDDAKNSLYLQMNSLRAEDTAVYYCANMLAAAGSHYFHYWGQGTLVTVSS

SEQ ID NO: 1329 - protein, 123 aa, Synthetic construct
QVQLVQSGSELKKPGASVKVSCKASGYTFTSYAMNWVRQAPGQGLEWMGWINTNTGNPTYAQGFTGRFVFSLDTSVSTAYLQISSLKAEDTAVYYCARDRIDGSSWSSWFDPWGQGTLVTVSS

SEQ ID NO: 1330 - protein, 115 aa, Synthetic construct
EVQLVESGGGLVQPGGSLRLSCAASGFTFSTYAMSWVRQAPGKGLEWVSVISGSFISTYYADSVKGRFTISRDNSKNTLYLQMTSLRAEDTAVYYCAKNSPFDYWGQGTLVTVSS

SEQ ID NO: 1331 - protein, 121 aa, Synthetic construct
EVQLVESGGGLVQPGGSLRLSCAASGFTFRNYAMNWARQAPGKGLEWVSGITGSGGATYYADSVKGRFTISRENSKNTLFLQMDTLRAEDTAVYYCAKDRRYFPTSGGPQWGQGTLVTVSS

SEQ ID NO: 1332 - protein, 125 aa, Synthetic construct
EVQLLESGGDLVQPGGSLRLSCAASGFTFRSYAMNWVRQAPGKGLEWVSVISGRGGTTYYADSVKGRFTISRDNSKNTLYLQMNSLRAEDAAVYYCAKIAVAGEGLYYYYGMDVWGQGTTVTVSS

SEQ ID NO: 1333 - protein, 131 aa, Synthetic construct
EVQLVESGGGLVKPGGSLRLSCAASGYTFSTYSMNWVRQAPGKGLEWVSSISSSSSYRYYADSVKGRFTISRDNAKNSLYLQMSSLRAEDTAVYYCAREGVSGSSPYSISWYDYYYGMDVWGQGTTVTVSS

SEQ ID NO: 1334 - protein, 118 aa, Synthetic construct
QSVEESGGRLVTPGTPLTLTCTVSGFSLSSYAMNWVRQAPGKGLEWIGAIRSSGATFFASWVNGRFTISKTSTTVDLKITSPTPEDTATYFCARDTNDGWYINRLDLWGPGTLVTVSS

SEQ ID NO: 1335 - protein, 121 aa, Synthetic construct
EVQLVESGGGLVQPGGSLRLSCAASGFSLSSYAMNWVRQAPGKGLEWIGAIRSSGATFFASSVNGRFTISRDNSKNTVYLQMNSLRAEDTAVYYCARDTNDGWYINRLDLWGQGTLVTVSS

SEQ ID NO: 1336 - protein, 119 aa, Synthetic construct
QVQLQESGGGLVQAGGSLRLSCAVSGRTFSTYAMGWFRQAPGKEREFVGSANWKSGSTYLVDSVKGRFTISGDNAHDTVHLQMTSLKPEDTGVYFCVARSFGTGQWDYWGQGTQVTVSS

SEQ ID NO: 1337 - protein, 119 aa, Synthetic construct
QVQLQESGGGLVQAGGSLRLSCAVSGRTFSTYAMGWFRQAPGKEREFVGSINFKSGSIYLADSVKGRFTISGDNAQNTAYLQMTSLKPEDTAVYLCVARSFGTGQWDYWGQGTQVTVSS

SEQ ID NO: 1338 - protein, 119 aa, Synthetic construct
QVQLQESGGGLVQAGGSLRLSCAASGDTFSTYAMGWFRQAPGKEREFVGRIVRGTESTYLIDSVKGRFAISRDNAQNTVYLQMTSLKPEDTAVYFCVARSFGAGQWDYWGQGTQVTVSS

SEQ ID NO: 1339 - protein, 119 aa, Synthetic construct
QVQLQESGGGLVQTGGSLRLSCSASGGTFETYAMGWFRQAPGKEREFVGSTNWKSERTYVADSVKGRFTISRDNGQYTAYLQMTSLKPEDTAVYFCVARSFGTGQWDYWGQGTQVTVSS

SEQ ID NO: 1340 - protein, 119 aa, Synthetic construct
QVQLQESGGGLVQAGGSLRLSCAVSGRGFSTYAMGWFRQAPGKEREFVGSANWKSGSIYVADSVKGRFTISNDNAQNTVYLQMSSLKPEDTAVYYCVARSFGTGQWDYWGQGTQVTVSS

SEQ ID NO: 1341 - protein, 123 aa, Synthetic construct
QVQLQESGGGLVQPGGSLRLSCAASGRTFSTYAMGWFRQAPGKEREFVAVINNNGDNTYYTPSVRGRFTISRDNAKDTGYLQMNSLKPEDTAVYYCAAHFTMRTVVAGTADYWGQGTQVTVSS

SEQ ID NO: 1342 - protein, 118 aa, Synthetic construct
EVQLVESGGGLVKPGGSLRLSCAASGFTFSSYAMNWVRQAPGKGLEWVSTITTGGSYTYYADSVKGRFTISRDNAKNSLYLQMNSLRAEDTAVYYCARQDGNFLMDYWGQGTLVTVSS

SEQ ID NO: 1343 - protein, 118 aa, Synthetic construct
EVQLVESGGGLVKPGGSLRLSCAASGFTFSSYAMNWVRQAPGKGLEWVSTITTGGSYTYYADSVQGRFTISRDNAKNSLYLQMNSLRAEDTAVYYCARQDGNFLMDYWGQGTLVTVSS

SEQ ID NO: 1344 - protein, 118 aa, Synthetic construct
EVQLVESGGGLVKPGGSLRLSCAASGFTFSSYAMNWVRQAPGKGLEWVSTITTGGSYTYYADSVEGRFTISRDNAKNSLYLQMNSLRAEDTAVYYCARQDGNFLMDYWGQGTLVTVSS

SEQ ID NO: 1345 - protein, 118 aa, Synthetic construct
EVQLVESGGGLVKPGGSLRLSCAASGFTFSSYAMNWVRQAPGKGLEWVGTITTGGSYTYYADSVDGRFTISRDNAKNSLYLQMNSLRAEDTAVYYCARQDGNFLMDYWGQGTLVTVSS

SEQ ID NO: 1346 - protein, 118 aa, Synthetic construct
EVQLVESGGGLVKPGGSLRLSCAASGFTFSSYAMNWVRQAPGKGLEWVSTITTGGSHTYYADSVEGRFTISRDNAKNSLYLQMNSLRAEDTAVYYCARQDGNFLMDYWGQGTLVTVSS

SEQ ID NO: 1347 - protein, 118 aa, Synthetic construct
EVQLVESGGGLVKPGGSLRLSCAASGFTFSSYAMNWVRQAPGKGLEWVSTITTGGSYTYYADSVDGRFTISRDNAKNSLYLQMNSLRAEDTAVYYCARQDGHFLMDYWGQGTLVTVSS

SEQ ID NO: 1348 - protein, 118 aa, Synthetic construct
EVQLVESGGGLVKPGGSLRLSCAASGFTFSSYAMNWVRQAPGKGLEWVSTITTGGSYTYYADSVDGRFTISRDNAKNSLYLQMNSLRAEDTAVYYCARQDGNFLMDYWGQGTLVTVSS

SEQ ID NO: 1349 - protein, 118 aa, Synthetic construct
EVQLVESGGGLVKPGGSLRLSCAASGFTFSSYAMNWVRQAPGKGLEWVGTITTGGSHTYYADSVQGRFTISRDNAKNSLYLQMNSLRAEDTAVYYCARQDGNFLMDYWGQGTLVTVSS

SEQ ID NO: 1350 - protein, 118 aa, Synthetic construct
EVQLVESGGGLVKPGGSLRLSCAASGFTFSSYAMNWVRQAPGKGLEWVSTITTGGSHTYYADSVEGRFTISRDNAKNSLYLQMNSLRAEDTAVYYCARQDGHFLMDYWGQGTLVTVSS

SEQ ID NO: 1351 - protein, 118 aa, Synthetic construct
EVQLVESGGGLVKPGGSLRLSCAASGFTFSSYAMNWVRQAPGKGLEWVGTITTGGSYTYYADSVDGRFTISRDNAKNSLYLKMNSLRAEDTAVYYCARQDGNFLMDYWGQGTLVTVSS

SEQ ID NO: 1352 - protein, 118 aa, Synthetic construct
EVQLVESGGGLVKPGGSLRLSCAASGFTFSHYAMNWVRQAPGKGLEWVSTITTGGSYTYYADSVEGRFTISRDNAKNSLYLQMNSLRAEDTAVYYCARQDGHFLMDYWGQGTLVTVSS

SEQ ID NO: 1353 - protein, 118 aa, Synthetic construct
EVQLVESGGGLVKPGGSLRLSCAASGFTFSSYAMNWVRQAPGKGLEWVSTITTGGSYTYYADSVEGRFTISRDNAKNSLYLQMNSLRAEDTAVYYCARQDGHFLMDYWGQGTLVTVSS

SEQ ID NO: 1354 - protein, 118 aa, Synthetic construct
EVQLVESGGGLVKPGGSLRLSCAASGFTFSSYAMNWVRQAPGKGLEWVSTITTGGSHTYYADSVHGRFTISRDNAKNSLYLQMNSLRAEDTAVYYCARQDGHFLMDYWGQGTLVTVSS

SEQ ID NO: 1355 - protein, 118 aa, Synthetic construct
EVQLVESGGGLVKPGGSLRLSCAASGFTFSSYAMNWVRQAPGKGLEWVSTITTGGSHTYYADSVDGRFTISRDNAKNSLYLQMNSLRAEDTAVYYCARQDGHFLMDYWGQGTLVTVSS

SEQ ID NO: 1356 - protein, 118 aa, Synthetic construct
EVQLVESGGGLVKPGGSLRLSCAASGFTFTSYAMNWVRQAPGKGLEWVSTITLGGSYTYYADSVQGRFTISRDNAKNSLYLQMNSLRAEDTAVYYCARQDGNFLMDYWGQGTLVTVSS

SEQ ID NO: 1357 - protein, 118 aa, Synthetic construct
EVQLVESGGGLVKPGGSLRLSCAASGFTFSSYAMNWVRQAPGKGLEWVSTITTGGSYTYYADSVEGRFTISRDNAKNSLYLQMNSLRAEDTAVYYCARQDGYFLMDYWGQGTLVTVSS

SEQ ID NO: 1358 - protein, 118 aa, Synthetic construct
EVQLVESGGGLVKPGGSLRLSCAASGFTFYSYAMNWVRQAPGKGLEWVSTITTGGSHTYYADSVEGRFTISRDNAKNSLYLQMNSLRAEDTAVYYCARQDGNFLMDYWGQGTLVTVSS

SEQ ID NO: 1359 - protein, 118 aa, Synthetic construct
EVQLVESGGGLVKPGGSLRLSCAASGFTFSSYAMNWVRQAPGKGLEWVGTITTGGSYTYYADSVQGRFTISRDNAKNSLYLQMNSLRAEDTAVYYCARQDGYFLMDYWGQGTLVTVSS

SEQ ID NO: 1360 - protein, 118 aa, Synthetic construct
EVQLVESGGGLVKPGGSLRLSCAASGFTFSSYAMNWVRQAPGKGLEWVSTITTGGSHTYYADSVEGRFTISRDNAKNSLYLQMNSLRAEDTAVYYCARQDGYFLMDYWGQGTLVTVSS

SEQ ID NO: 1361 - protein, 118 aa, Synthetic construct
EVQLVESGGGLVKPGGSLRLSCAASGFTFSSYAMNWVRQAPGKGLEWVGTITTGGSHTYYADSVEGRFTISRDNAKNSLYLQMNSLRAEDTAVYYCARQDGYFLMDYWGQGTLVTVSS

SEQ ID NO: 1362 - protein, 118 aa, Synthetic construct
EVQLVESGGGLVKPGGSLRLSCAASGFTFSSYAMNWVRQAPGKGLEWVSTITTGGSHTYYADSVEGRFTISRDNAKNSLYLQMDSLRAEDTAVYYCARQDGNFLMDYWGQGTLVTVSS

SEQ ID NO: 1363 - protein, 120 aa, Synthetic construct
EVQLVESGGGLVKPGGSLRLSCAASGFTFSKYAMNWFRQAPGKGLEWVSTITLGGSYTYYADSVDGRFTISRDNAKNSLYLQMNSLRAEDTAVYYCARQYLDGNFLMDYWGQGTLVTVSS

SEQ ID NO: 1364 - protein, 120 aa, Synthetic construct
EVQLVESGGGLVKPGGSLRLSCAASGFTFSKYAMNWFRQAPGKGLEWVSTITTGGSYTYYADSVEGRFTISRDNAKNSLYLQMNSLRAEDTAVYYCARQHPYGNFLMDYWGQGTLVTVSS

SEQ ID NO: 1365 - protein, 118 aa, Synthetic construct
EVQLVESGGGLVKPGGSLRLSCAASGFTFSSYAMNWVRQAPGKGLEWVGTITTGGSHTYYADSVEGRFTISRDNAKNSLYLQMNSLRAEDTAVYYCARQDGNFLMDYWGQGTLVTVSS

SEQ ID NO: 1366 - protein, 118 aa, Synthetic construct
EVQLVESGGGLVKPGGSLRLSCAASGFTFSSYAMNWVRQAPGKGLEWVGTITTGGSYTYYADSVEGRFTISRDNAKNSLYLQMNSLRAEDTAVYYCARQDGNFLMDYWGQGTLVTVSS

SEQ ID NO: 1367 - protein, 118 aa, Synthetic construct
EVQLVESGGGLVKPGGSLRLSCAASGFTFSSYAMNWVRQAPGKGLEWVGTITTGGSYTYYADSVQGRFTISRDNAKNSLYLQMNSLRAEDTAVYYCARQDGNFLMDYWGQGTLVTVSS

SEQ ID NO: 1368 - protein, 118 aa, Synthetic construct
EVQLVESGGGLVKPGGSLRLSCAASGFTFSSYAMNWVRQAPGKGLEWVGTITTGGSHTYYADSVEGRFTISRDNAKNSLYLQMNSLRAEDTAVYYCARQDGHFLMDYWGQGTLVTVSS

SEQ ID NO: 1369 - protein, 118 aa, Synthetic construct
EVQLVESGGGLVKPGGSLRLSCAASGFTFSQYAMNWVRQAPGKGLEWVSTITKKGSFTYYADSVDGRFTISRDNAKNSLYLQMNSLRAEDTAVYYCARQDGEFLMDYWGQGTLVTVSS

SEQ ID NO: 1370 - protein, 118 aa, Synthetic construct
EVQLVESGGGLVKPGGSLRLSCAASGFTFSQYAMNWVRQAPGKGLEWVSTIKKGGSFTYYADSVDGRFTISRDNAKNSLYLQMNSLRAEDTAVYYCARQDGEFLMDYWGQGTLVTVSS

SEQ ID NO: 1371 - protein, 118 aa, Synthetic construct
EVQLVESGGGLVKPGGSLRLSCAASGFTFSSYAMNWVRQAPGKGLEWVSTITKGGSYTYYADSVDGRFTISRDNAKNSLYLQMNSLRAEDTAVYYCARQDGNFLMDYWGQGTLVTVSS

SEQ ID NO: 1372 - protein, 118 aa, Synthetic construct
EVQLVESGGGLVKPGGSLRLSCAASGFTFHSYAMNWVRQAPGKGLEWVSTITTRGSYTYYADSVEGRFTISRDNAKNSLYLQMNSLRAEDTAVYYCARQDGNFLMDYWGQGTLVTVSS

SEQ ID NO: 1373 - protein, 118 aa, Synthetic construct
EVQLVESGGGLVKPGGSLRLSCAASGFTFSSYAMNWVRQAPGKGLEWVSTITTGGSHTYYADSVDGRFTISRDNAKNSLYLQMNSLRAEDTAVYYCARQDGNFLMDYWGQGTLVTVSS

SEQ ID NO: 1374 - protein, 118 aa, Synthetic construct
EVQLVESGGGLVKPGGSLRLSCAASGFTFSSYAMNWVRQAPGKGLEWVSTITTGGSYTYYADSVHGRFTISRDNAKNSLYLQMNSLRAEDTAVYYCARQDGNFLMDYWGQGTLVTVSS

SEQ ID NO: 1375 - protein, 123 aa, Synthetic construct
MGSKGGFILLWLLSILAVLCHLGHSLQCYNCINPAGSCTTAMNCSHNQDACIFVEAVPPKTYYQCWRFDECNFDFISRNLAEKKLKYNCCRKDLCNKSDATISSGKTALLVILLLVATWHFCL

SEQ ID NO: 1376 - protein, 143 aa, Synthetic construct
CSSFQNDDYAMNYKGQIGDPIMAIAMLSEQQHEWAGTPYVLGGVSRRGVDCSGFVQKTFFDRFNLRLPRSTVEQANYGKHVRKEHIQTGDLIFFKTGLGPNGYHVGIYVKEDKFLHASTRGGVVYSSMNNPYWSKAFWQVRRI

SEQ ID NO: 1377 - protein, 143 aa, Synthetic construct
CSSFQNDDYAMNYKGQIGDPIMAIAMLSEQQHEWAGTPYVLGGVSRRGVDCSGFVQKTFFDRFNLRLPRSTVEQANYGKHVRKEDIQTGDLIFFKTGRGPNGYHVGIYVKEDKFLHASTRGGVVYSSMNNPYWSKAFWQVRRI

SEQ ID NO: 1378 - protein, 126 aa, Synthetic construct
EVQLLESGGGLVQPGGSLRLSCAASGFTFNYYAMNWVRQAPGKGLEWVAAISGSGGRTYYADSVKGRFTISRDNSKNTLYLQMNSLRAEDTAVYYCAKDSPFLLDDYYYYYYMDVWGKGTTVTVSS

SEQ ID NO: 1379 - protein, 115 aa, Synthetic construct
EVQLVESGGGLVQPGRSLRLSCAASGFTFDTYGMNWVRQAPGKGLEWVSGISYNGGTTAYADSVRGRFTISRDNAKNSLYLQMNSLRAEDTALYYCARGRYSDVWGQGTTVTVSS

SEQ ID NO: 1380 - protein, 115 aa, Synthetic construct
EVQLVESGGGLVQPGRSLRLSCAASGFTFDTYGMNWVRQAPGKGLEWVSGISYNAGTKAYADSVRGRFTISRDNAKNSLYLQMNSLRAEDTALYYCARGRYSDVWGQGTTVTVSS

SEQ ID NO: 1381 - protein, 118 aa, Synthetic construct
QVQLVESGGGVVQPGRSLRLSCAASGFTFSNYAMNWVRQAPGKGLEWVIISYDSSSKYYADSVKGRFTISRDNSKNTLYLQMNSLRAEDTAVYYCARGSGKRDAFDVWGQGTMVTVSS

SEQ ID NO: 1382 - protein, 124 aa, Synthetic construct
EVQLVESGGGLVQAGGSLRLSCAASGRTFSTYAMGWFRQAPGKEREFVAAISKGGGITYYSDSVRGRFTISKENAKNTVYLQMNSLKPEDTAVYYCAADPVSSVAKSPVAYPYWGQGTQVTVSS

SEQ ID NO: 1383 - protein, 140 aa, Synthetic construct
RLYPPGPLLVPHENVEDCVVSGYHIPKGTRLFANVMKLQRDPKLWSNPDKFDPERFFAADIDFRGQHYEFIPFGSGRRSCPGMTYAMQVEHLTIAHLIQGFNYKTPNDEPLDMKEGAGLTIRKVNPIEVVITPRLTPELY

SEQ ID NO: 1384 - protein, 124 aa, Synthetic construct
EVQLLESGGGLVQPGGSQRLSCVASGVPFSNYAMNWVRQAPGKGLEWVSSISGGGDRTFYADSVKGRFTISRDNSKNTLYLQMNSLGAGDTAVYYCAKTYYDFWSGYSRHLNSWGQGSLVTVSS

SEQ ID NO: 1385 - protein, 130 aa, Synthetic construct
EVQLVESGGHLVQPGRSLRLSCAASGFTFEDYAMNWVRQAPGKGLEWVSVISWDSGRIGYADSVKGRFTISRDNAKNSSYLQMNSLRPEDTALYYCVRDMLAYYSDNSGKKYNVYGMDVWGQGTTVTVSS

SEQ ID NO: 1386 - protein, 119 aa, Synthetic construct
EVQLLESGGGLVQPGGSLRLSCAASGFTFSTYAMNWVRQAPGKGLEWVALISSGGSYKYYADSVKGRFTISRDNSKNTLYLQMNSLRAEDTAVYYCAKDNFILLNSWFDYWGQGTLVTV

SEQ ID NO: 1387 - protein, 121 aa, Synthetic construct
QVQLVQSGAEVKKPGSSVKVSCKASGGTFSTYAMNWVRQAPGQGLEWMGSIIVYSGSTSYAQKFQGRVTITADKSTSTAYMELSSLRSEDTAVYYCARATAVSRNVSLDYWGQGTLVTVSS

SEQ ID NO: 1388 - protein, 109 aa, Synthetic construct
EVQLLESGGGLVQPGGSLRLSCAASGFTFSSYAMNWVRQAPGKGLEWVALISNGSAYTYYADSVKGRFTISRDNSKNTLYLQMNSLRAEDTAVYYCAKDNFILLNSWFD

SEQ ID NO: 1389 - protein, 117 aa, Synthetic construct
QVQLVESGGGVVQPGRSLRLSCAASGFTFSTYAMHWVRQAPGRGLEWVAGISYDGSNKYHADPVKGRFTISRDNSKNTLYLQMNNLRVEDSAVYYCAGDRSGGLDVWGQGTTVTVSS

SEQ ID NO: 1390 - protein, 116 aa, Synthetic construct
  VARIANT 103: note = X can be any amino acid
  VARIANT 104: note = X can be any amino acid
MGCSISGLNALYDAATGGGDVWINERRFRVLRQIGEGGFAFVYLVREHQPASDAAFARRDPAHVSEDGTYAMKKVLIQSKEQLDLVREEIRVSSLFNHPNLLXXLLDHAINSREDV

SEQ ID NO: 1391 - protein, 120 aa, Synthetic construct
EVQLLESGGGLLQPGGSLRLSCAASGITFSTYAMSWVRQAPGRGLEWVSAISGSGDSTSYADSVKGRFTSSRDNSKNTLYLQMNSLRAEDTAVYYCAKVIAARPHWNFDLWGRGTLVTVS

SEQ ID NO: 1392 - protein, 119 aa, Synthetic construct
EVQMVESGGGLVQPGGSLRLSCAVSGFSLSSYSVHWVRQAPGKGLEWVAGIWSGGSIHYTPALSSRFTVSRDDSKNTVYLQMNSLRAEDTAVYYCARYDRYETYAMDYWGQGTLVTVSS

SEQ ID NO: 1393 - protein, 119 aa, Synthetic construct
QVQMQESGPGLVRPSQTLSLTCTVSGFSLSSYSVHWVRQPPGRGLEWIGGIWSGGSIHYTPALSSRVTVLRDTSKNQVSLRLSSVTAADTAVYYCARYDRYETYAMDYWGQGSLVTVSS

SEQ ID NO: 1394 - protein, 119 aa, Synthetic construct
EVQLVESGGGLVQPGGSLRLSCAVSGFSLSSYSVHWFRKAPGKGLEWLGGIWSGGSIHYTPALSSRLTVSRDISKNTVYLQMNSLRAEDTAVYYCARYDRYETYAMDYWGQGTLVTVSS

SEQ ID NO: 1395 - protein, 122 aa, Synthetic construct
EVQLVESGGGLVQPGGSLRLSCAASGFTFSSYAMNWVRQAPGKGLEWVSSISGSGGNTYYADSVKGRFTISRDNSKNTLYLQLNSLRAEDTAVYYCAKDHSLSWYRNVFDIWGQGTMVTVSS

SEQ ID NO: 1396 - protein, 140 aa, Synthetic construct
MEFGLSWLFLVAILKGVQCGVQLLESGGGLVQPGGSLRLSCAGSQFTFSTYAMNWVRQAPGKGLEWVSGISGDGYRIQYADSVEGRFSISRDNSNNMVYLQMTSLRAEDTAVYFCAKDLFPRTIGYFDYWGQGTRVTVSS

SEQ ID NO: 1397 - protein, 118 aa, Synthetic construct
EVQLVESGAEVKKPGSSVKVSCKVSGGTFGTYALNWVRQAPGQGLEWMGRIVPLIGLVNYAHNFEGRISITADKSTGTAYMELSNLRSDDTAVYYCAREVYGGNSDYWGQGTLVTVSS

SEQ ID NO: 1398 - protein, 122 aa, Synthetic construct
EVQLLESGGGLVQPGGSLRLSCAASGFTFSTYAMVWVRQAPGKGLEWVSSIYPSGGITTYADSVKGRFTISRDNSKNTLYLQMNSLRAEDTAVYYCAYRRTGIPRRDAFDIWGQGTMVTVSS

SEQ ID NO: 1399 - protein, 120 aa, Synthetic construct
EVQLVQSGGGLVQAGDSLRLSCAASGGISSTYAMGWFRQAPGKEREFVASIRLGSEATYYADSVKGRFTISRDNALKTIYLQMNSLKPDDTAVYYCAVDASLFLVTVDYWGRGTQVTVSS

SEQ ID NO: 1400 - protein, 126 aa, Synthetic construct
EVQLVESGGGVIQPGGSLRLSCAASGFTFDDYAMNWVRQGPGKGLEWVSAISGDGGSTYYADSVKGRFTISRDNSKNSLYLQMNSLRAEDTAFFYCAKDLRNTIFGVVIPDAFDIWGQGTMVTVSS

SEQ ID NO: 1401 - protein, 121 aa, Synthetic construct
EVQLLESGGGLVQPGGSLRLSCAASGFTFSTYAMSWVRQAPGKGLEGVSGISGTGYRTYYADSVKGRFTISRDNSKNSLYLQMNSLRAEDTAVYYCAKDRGLLWFGELTYWGQGTLVTVSS

SEQ ID NO: 1402 - protein, 124 aa, Synthetic construct
EVQLLESGGGLVQPGGSLRLSCVASGFTFSTYAMSWVRQAPGMGLEWVSSISGSGRNTYYADSVKGRFTISRDNSKNTLFLQMNSLRAEDTAVYYCAKESVTGTSSYYYGVDVWGQGTTVTVSS

SEQ ID NO: 1403 - protein, 121 aa, Synthetic construct
EVQLVESGGGLVQPGGSLRLSCAASGFTFKTYAMSWVRQAPGRGLEWVSGISGSGSTSYYADSVKGRFTISRDNYKKTLSLQMNSLRAEDTAVYYCALDIMATVGGLFNNWGQGTLVTVSS

SEQ ID NO: 1404 - protein, 121 aa, Synthetic construct
EVQLVESGGDLVQPGGSLRLSCAASGFTFSTYAMNWVRQAPGKGLEWVSHISGSGGNSYSADSVKGRFTISRDNSKNTLYLQMNSLRAEDTAIYYCSLDIMATVGGLFAYWGQGTLVTVSS

SEQ ID NO: 1405 - protein, 121 aa, Synthetic construct
EVQLLESGGGLVQPGGSLRLSCAASEFTFSSYAMNWVRQAPGKGLEWVSVISGRGGNTFYADSVKGRFTISRDNSKNTLFLQMNSLRAEDTAVYYCASRLAVAGSEAFDIWGQGTMVTVSS

SEQ ID NO: 1406 - protein, 121 aa, Synthetic construct
EVQLLESGGGLVQPGGSLRLSCAASEFTFSSYAMNWVRQAPGKGLEWVSVISGRGGNTFYADSVKGRFTISRDNSKNTLYLQMNSLRAEDTAVYYCASRLAVAGSEAFDIWGQGTMVTVSS

SEQ ID NO: 1407 - protein, 121 aa, Synthetic construct
EVQLLESGGGLVQPGGSLRLSCAASGFTFSSYAMNWVRQAPGKGLEWVSVISGSGGSTYYADSVKGRFTISRDNSKNTLYLQMNSLRAEDTAVYYCAKRIAAAGTEYFDLWGRGTLVTVSS

SEQ ID NO: 1408 - protein, 117 aa, Synthetic construct
EVQLVESGGGLVQPGGSLRLLCAASGITFSTYSMNWVRQAPGKGLEWVSYISRSSSTIDYADSVKGRFTISRDNAKNSLYLQMNSLRDEDTAVYYCARGGGSPFDYWGQGTLVTVSS

SEQ ID NO: 1409 - protein, 121 aa, Synthetic construct
EVQLLESGGGLVQPGGSLRLSCAASEFTFSSYAMNWVRQAPGKGLEWVSIISGRGGNTFYADSVKGRFTISRDNSKNTLYLQMNSLRAEDTAVYYCASRLAVAGSEAFDIWGQGTMVTVSS

SEQ ID NO: 1410 - protein, 121 aa, Synthetic construct
EVQLLESGGGLVQPGGSLRLSCAASGFTFSSYAMNWVRQAPGKGLEWVSVISGSGSNTYYADSVKGRFTISRDNSKNTLYLQMNSLRAEDTAVYYCAKRYTSDWHDAFDIWGQGTMVTVSS

SEQ ID NO: 1411 - protein, 121 aa, Synthetic construct
EVQLLESGGGLVQPGGSLRLSCVASGFTFSSYAMNWVRQAPGKGLEWVSVISGSGGSTYYADSVKGRFTISRDNSKNTLYLQMNTLRAEDTAVYYCAKRYTSDWHDAFDIWGQGTMVTVSS

SEQ ID NO: 1412 - protein, 121 aa, Synthetic construct
EVQLLESGGGLVQPGGSLRLSCAASEFTFSSYAMNWVRQAPGKGLEWVSIISGRGVNTFYADSVKGRFTISRDNSKNTLYLQMNSLRAEDTAVYYCASRLAVAGSEAFDIWGQGTMVTVSS

SEQ ID NO: 1413 - protein, 121 aa, Synthetic construct
EVQLLESGGGLVQPGGSLRLSCAASGFTFSSYAMNWVRQAPGMGLEWVSVISRSGGYTYYADSVKGRFTISRDNSKNTLYLQMNSLRAEDTAVYYCASRLAVAGSEAFDIWGQGTLVTVSS

SEQ ID NO: 1414 - protein, 121 aa, Synthetic construct
EVQLLESGGDLVQPGGSLRLSCTASGFTFSSYAMNWVRQAPGKGLEWVSVISGSGGNTFYADSVKGRFTISRDNSKNTLFLHMNSLRAEDTAVYYCASRMAVAGSEAFDIWGQGTMVTVSS

SEQ ID NO: 1415 - protein, 121 aa, Synthetic construct
EVQLLESGGGLVQPGGSLRLSCAASGFTFSSYAMNWVRQAPGKGLEWVSVISGSGGTTYFADSVKGRFTISRDNSKNTLYLQMNSLRAEDTAVYYCAKRNSSGWHDVFDIWGQGTKVTVSS

SEQ ID NO: 1416 - protein, 121 aa, Synthetic construct
EVQLLESGGGLVQPGGSLRLSCAASGFTFSSYAMNWVRQAPGKGLEWVSVISGSGGTTYYADSVKGRFTISRDNSKNTLYLQMNTLRAEDTAVYYCAKRYTSDWHDAFDIWGQGTMVTVSS

SEQ ID NO: 1417 - protein, 115 aa, Synthetic construct
EVQLLESGGGLVQPGGSLRLSCTASGFTFSSYAMNWVRQAPGKGLEWVSAISGSGGFTYYADSVKGRFTISRDNSRNTLYLQMNSLRAEDTAVYYCARTSGFDYWGQGTLVTVSS

SEQ ID NO: 1418 - protein, 121 aa, Synthetic construct
EVQLLESGGGLVQPGGSLRLSCAASEFTFSSYAMNWVRQAPGKGLEWVSVISGRGGNTFYADSVKGRFTISRDNSKNTLYLQMNSLRAEDTAVYYCASRLAVAGSEACDIWGQGTMVTVSS

SEQ ID NO: 1419 - protein, 114 aa, Synthetic construct
EVQLVESGGGLVKPGGSLRLSCAASGFTFSTYSMNWVRQAPGKGLEWVSSISSSSSYIYYADSVKGRFTISRDNAKNSLYLQMNSLRAEDTAIYYCARDRGSLWGQGTLVTVSS

SEQ ID NO: 1420 - protein, 121 aa, Synthetic construct
EVQLLESGGGLVQPGGSLRLSCAASKFTFSSYAMNWVRQAPGKGLEWISIISGRGGNTFYADSVKGRFTISRDNSKNTLYLQMNSLRAEDTAVYYCASRLAVAGSEAFDIWGQGTMVTVSS

SEQ ID NO: 1421 - protein, 123 aa, Synthetic construct
EVQVLESGGGLVQPGGSLRLSCAASGFTFSSYAMNWVRQAPGKGLEWVSAISGRGGSTFYADSEKGRFTISRDNSKNTLYLQMNSLRAEDTALYYCAKGELLEDYYYYGMDVWGQGTTVTVSS

SEQ ID NO: 1422 - protein, 123 aa, Synthetic construct
EVQVLESGGGLVQPGGSLRLSCAASGFTFSSYAMNWVRQAPGKGLEWVSAISGRGGNTFYADSVKGRFTISRDNSKNTLYLQMNSLRAEDTAVYYCAKGELLEDYYYYGMDVWGQGTTVTVSS

SEQ ID NO: 1423 - protein, 123 aa, Synthetic construct
EVQLVESGGGLVQPGGSLRLSCAASGFTFSSYAMNWVRQAPGKGLEWVSAISGRGGSTFHADSVKGRFTISRDNSKNTLYLQMNSLRAEDTAVYYCVKGELLEDYYFYGMDVWGQGTTVTVSS

SEQ ID NO: 1424 - protein, 123 aa, Synthetic construct
EVQLLESGGGLVQSGGSLRLSCEASGFIFSSYAMNWVRQVPGKGLEWVSAISRRGGSTFYADSVKGRFTISRDNSKNTLYLQMNSLRAEDTAVYFCAKGELLEDYSYYGIDVWGQGTTVTVSS

SEQ ID NO: 1425 - protein, 123 aa, Synthetic construct
EVQLSESGGGLVQPGGSLRLSCAASGFTFSSYAMNWVRQAPGKGLEWVSAISGRGGSTFHADSVKGRFTISRDNSKNTLYLQMNSLRAEDTAVYYCVKGELVEDYYFYGMDVWGQGTTVTVSS

SEQ ID NO: 1426 - protein, 123 aa, Synthetic construct
EVQLLESGGGLVQPGGSLRLSCAASGFTFNNYAMNWVRQAPGKGLEWVSAISRRGGSTFYADSVKGRFTISRDNSKNTLYLQMNSLRAEDTAVYYCAKGELLEDYYYFAMDVWGQGTTVTVSS

SEQ ID NO: 1427 - protein, 123 aa, Synthetic construct
EVQLLESGGGLVQPGGSLRLSCAASGFTFSSYAMNWVRQAPGEGLEWVSAISGRGGSTFYADSVKGRFTISRDNSKNTLFLQMNSLRAEDTAVYYCAKGELLEDYYYYGMDVWGQGTTVTVSS

SEQ ID NO: 1428 - protein, 123 aa, Synthetic construct
EVQLLESGGGLVQPGGSLRLSCAASGFTFNNYAMNWVRQAPGKGLEWVSAISRRGGNTFYADSVKGRFTISRDNSKNTLYLQMNSLRAEDTAVYYCAKGELLEDYYYYAMDVWGQGTTVTVSS

SEQ ID NO: 1429 - protein, 121 aa, Synthetic construct
EVQLLESGGGLVQPGGSLRLSCAASGFTFSGYAMNWVRQAPGMGLEWVSVISRSGGYTYYADSVKGRFTISRDNSKNTLYLQMNSLRAEDTAVYYCASRLAVAGSEAFDIWGQGTMVTVSS

SEQ ID NO: 1430 - protein, 121 aa, Synthetic construct
EVQLLESGGGLVQPGGSLRLSCAASGFTFSSYAMNWVRQAPGKGLEWVSVISGSGGSTYYADSVKGRFTISRDNSKNTLYLQMNTLRAEDTAVYYCAKRYTSDWHDAFDIWGQGTMVTVSS

SEQ ID NO: 1431 - protein, 120 aa, Synthetic construct
EVQLLESGGGLVQPGGSLRLSCAASGFTFSSYAMNWVRQAPGKGLEWVSVISGRGGSTYYADSVKGRFTISRDNSKNTLYLQMNSLRAEDTAVYYCAKRIAAGMEYFDLWGRGTLVTVSS

SEQ ID NO: 1432 - protein, 115 aa, Synthetic construct
EVQLWESGGGLVQPGGSLRLSCAASGFTFSSYAMNWVRQAPGKGLEWVSAISGSGGYTYYADSVKGRFTISRDNSKNTLYLQMSSLRAEDTAVYYCAKGGSLFYWGQGTLVTVSS

SEQ ID NO: 1433 - protein, 121 aa, Synthetic construct
EVQLLESGGGLVQPGGSLRLSCAASEFTFSSYAMNWVRQAPGKGLEWVSVISGRGGNTFYADSVKGRFTISRDNSKNTLYLQMNSLRAEDTAVYFCASRLAVAGSEAFDIWGQGTMVTVSS

SEQ ID NO: 1434 - protein, 121 aa, Synthetic construct
EVQLLESGGGLVQPGGSLRLSCAASGFTFSSYAMNWVRQAPGMGLEWVSVISRSGGYTYYADSVKGRFTISRDNSKNTLYLQMNSLRAEDTAVYYCASRLAVAGSEAFDIWGQGTMVTVSS

SEQ ID NO: 1435 - protein, 121 aa, Synthetic construct
EVQLLESGGGLVQPGGSLRLSCAASEFTFSSYAMNWVRQAPGKGLEWVSVISGRGINTFYADSVKGRFTISRDNSKNTLYLQMNSLRAEDTAVYYCASRLAVAGSEAFDIWGQGTMVTVSS

SEQ ID NO: 1436 - protein, 121 aa, Synthetic construct
EVQLLESGGGLVQPGGSLRLSCAASGFTFSNYAMNWVRQAPGKGLEWVSAISGGGGNTFYADSVKGRFTISRDNSKNTLYLQMNGLRAEDTAVYYCASRIAVAGSEAFAIWGQGTLVTVSS

SEQ ID NO: 1437 - protein, 121 aa, Synthetic construct
EVQLLESGGGLVQSGGSLRLSCAASGFTFSSYAMNWVRQAPGKGLEWVSGVVGSGGRTYYADSVKGRFIISRDNSKNTLYLQMNSLRAEDTAVYYCAKDRGQWLLGGMDVWGQGTTVTVSS

SEQ ID NO: 1438 - protein, 120 aa, Synthetic construct
EVQLLESGGGLVQPGGSLRLSCAASGFTFSSYAMNWVRQAPGKGLEWVSAISGSGGATYYADSVKGRFTISRDNSKNTLYLQMNSLRAEDTAVYYCAKPLVGAHDAFEIWGQGTMVTVSS

SEQ ID NO: 1439 - protein, 121 aa, Synthetic construct
EVQLLESGGGLVQPGGSLRLSCAASGFTFSTYAMSWVRQAPGKGLEWVSAISGSGVNTFYADSVKGRFTISRDNSKNTLFLQMNSLRAEDTAVYYCAKLGKDYYYYGMDVWGQGTTVTVSS

SEQ ID NO: 1440 - protein, 121 aa, Synthetic construct
EVQLLESGGGLVQPGGSLRLSCAASGFTFRTYAMTWVRQAPGKGLEWVSAISGSGVNSFYADSVKGRFTISRDNSENTLYLQMNSLRAEDTAVYYCAKARAVAGSHWFDPWGQGTLVTVSS

SEQ ID NO: 1441 - protein, 121 aa, Synthetic construct
EVQLLESGGGLVQPGGSLRLSCAASGFTFSSYAMNWVRQAPGKGLEWVSAISGSGGNTFYADSVKGRFTISRDNSKNTLYLQMNSLRAEDTAVYYCAKRGVYGDYEAFDIWGQGTMVTVSS

SEQ ID NO: 1442 - protein, 123 aa, Synthetic construct
EVQLLESGGGLVQPGGSLRLSCAASGFTFNSYAMNWVRQAPGKGLEWVSAISGSGGNTFYADSVKGRFTISRDNSKNTLYLQMNSLRAEDTAVYYCAKKDNDYVWGSPYFDYWGQGTLVTVSS

SEQ ID NO: 1443 - protein, 122 aa, Synthetic construct
EVQLLESGGGLVQPGGSLRLSCAASGFTFSSYAMNWVRQAPGKGLEWVSAISGSGGNTFYADSVKGRFTISRDNSKNTLYLQMNSLRAEDTAVYYCAKRVTDYGGNDWFDPWGQGTLVTVSS

SEQ ID NO: 1444 - protein, 122 aa, Synthetic construct
EVQLLESGGGLVQPGGSLRLSCAASGFTFSSYAMNWVRQAPGKGLEWVSAISGSGGNTFYADSVKGRFTISRDNSKNTLNLQMSSLRAEDTAVYYCAKRVTDYGGNDWFDPWGQGTLVTVSS

SEQ ID NO: 1445 - protein, 122 aa, Synthetic construct
EVQLLESGGGLVQPGGSLRLSCAASGFTFSSYAMNWVRHAPGKGLEWVSAISGSGKNTFYADSVKGRFTISRDNSKNTLYLQMNSLRAEDTAVYYCAKRVTDYGGNDWFDPWGQGTLVTVSS

SEQ ID NO: 1446 - protein, 122 aa, Synthetic construct
EVQLLESGGGLVQPGGSLRLSCAASGFTFSSYAMNWVRQAPGKGLEWVSAISGRGGNTFYADSVKGRFTISRDNSKNTLYLQMNSLRAEDTAVYYCAKRVTDYGGNDWFDPWGQGTLVTVSS

SEQ ID NO: 1447 - protein, 122 aa, Synthetic construct
EVQLLESGGGLVQPGGSLRLSCAASGFTFSSYAMNWVRQAPGKGLEWVSTISGRGLGTYYADSVKGRFTISRDNSKNTLYLQLNSLRAEDTAVYYCAKDHDYGDYNIYFDYWGQGTLVTVSS

SEQ ID NO: 1448 - protein, 121 aa, Synthetic construct
EVQLLESGGGLVQPGGSLRLSCAASEFTFSTYAMSWVRQAPGKGLEWVSVISGSGGSTYYADSVKGRFTISRDNSKNTLYLQMNSLRAEDTAVYYCAKRSSGWYEDALDIWGQGTMVTVSS

SEQ ID NO: 1449 - protein, 123 aa, Synthetic construct
EVQLLDSGGGLGQPGGSLRLSCAASGFTFDSYAMNWVRQAPGKGLEWVSTISGTGRRTYYADSVKGRFTISRDNSKNTLYLQMNSLRAEDTAVYYCAKEEDYYDSSGPGFDPWGQGTLVTVSS

SEQ ID NO: 1450 - protein, 120 aa, Synthetic construct
EVQLLESGGGLVQPGGSLRLSCAASGFTFSTYAMSWVRQAPGKGLEWVSAISRSGGNTHYADSVKGRFTISRDNSKNTLYLQMNSLRAEDTAVYSCAKDGFGGSSYFDYWGQGTLVTVSS

SEQ ID NO: 1451 - protein, 121 aa, Synthetic construct
EVQLLESGGGLAQPGGSLRLSCAASGFTFSSYAMNWVRQAPGKGLEWVSAIIGNGGRTYYADSVKGRFSISRDNSKNTLFLQMNSLRAEDTAVYYCAKDLGRYSYGFFDYWGQGTLVTVSS

SEQ ID NO: 1452 - protein, 124 aa, Synthetic construct
EVQVLESGGGLVQPGGSLRLSCAASGFTFSTYAMSWVRQAPGKGLEWVSAISGSGGSTYYADSVKGRFTISRDNSKNTLYLQMDSLRAEDTAVYYCAKGISGTGSYYYYGVDVWGQGTTVTVSS

SEQ ID NO: 1453 - protein, 113 aa, Synthetic construct
EVQLVESGGGLVKPGGSLRLSCAVSGFTFSTYSMNWVRQAPGKGLEWVSSISSSINYMYYADSVKGRFTISRDNAKNSLYLQMNSLRAEDSAVYYCARLGVYWGQGTLVTVSS

SEQ ID NO: 1454 - protein, 121 aa, Synthetic construct
EVQLLESGGGLVQPGGSLRLSCAASGFTFSTYAMSWVRQAPGKGLEWVSIISGGGSSTYYADSVKGRFTISRDNSKNTLYLQMNSLRAEDTAVYYCAKWRGNPTDYGMDVWGQGTTVTVSS

SEQ ID NO: 1455 - protein, 122 aa, Synthetic construct
EVQLLESGGGLVQPGGSLRLSCAASGFTFSSYAMNWVRQAPGKGLEWVSAISGRGGNTFYADSVKGRFTISRDNSKNTLYLQMNSLRAEDTAVYYCAKRETYNWNYEGFDYWGQGTLVTVSS

SEQ ID NO: 1456 - protein, 117 aa, Synthetic construct
QSVEESGGRLVTPGTPLTLTCTVSGIDLSTYAMTWVRRAPGKGLEWLGIINRSSKTYLTDWARGRFTISKTSTTVDLKISSPTTEDTATYFCGRVMSPYSVAGGDLWGPGTLVTVSS

SEQ ID NO: 1457 - protein, 118 aa, Synthetic construct
EVKLVESGGGLVKPGGSLKLSCAASGFTFRTYAMSWVRQTPEKRLEWVASISSGSSTYYLDSVKGRFTISRDNARNILYLQMSSLRSEDTAMYYCARGGDYGYALDYWGQGTSVTVSS

SEQ ID NO: 1458 - protein, 118 aa, Synthetic construct
EVRLVESGGGLVKPGGSLKLSCAASGFTFSTYAMSWVRQTPEKRLEWVASINGGGSTYYPDSVKGRFTISRDNARNILYLQMRSLRSEDTAMYYCARGGDYGYALDYWGQGTSVTVSS

SEQ ID NO: 1459 - protein, 121 aa, Synthetic construct
QSLEESGGRLVTPGGSLTLTCTVSGFSLSTYAMTWVRQAPGKGLEWIGIIYAGTDITWYASWAKGRFTISKTSTTVDLSITSPTTEDTATYFCAKVPYTGVSDYLYYFDLWGPGTLVTVSS

SEQ ID NO: 1460 - protein, 122 aa, Synthetic construct
EVQLVESGGGLVQPGRSLRLSCTSSGFTFGDYAMNWVRQAPGKGLEWVGFIRSKPYGGTTEYAASLKGRFTVSRDDSKSIAYLQMNSLKTEDTALYYCTRSLRGVQGPLDYWGQGTLVTVSS

SEQ ID NO: 1461 - protein, 141 aa, Synthetic construct
MEFGLSWVFLVAILKGVQCEVKLVESGGGLVQPGRSLRLSCTSSGFTFGDYAMNWVRQAPGKGLEWVGFIRSKPYGGTTEYAASLKGRFTVSRDDSKSIAYLQMNSLKTEDTALYYCTRSLRGVQQPLDYWGQGTLVTVSS

SEQ ID NO: 1462 - protein, 123 aa, Synthetic construct
EVQLVESGGGLVQAGGSLRLSCAASGRTYAMAWFRQAPGKEREFVAHINALGTRAYYSDSVEGRFTISRDNAKNTGYLQMNSLEPEDTAVYVCAAGGQWRAAPVADAAQYDFWGQGTQVTVSS

SEQ ID NO: 1463 - protein, 123 aa, Synthetic construct
EVQLVESGGGLVQAGGSLRLSCAASGRTYAMAWFRQAPGKEREFVAHINALGTRTYYSDSVQGRFTISRDNAKNTEYLQMNSLKPEDTAVYYCAAGGQWRAAPVADAAQYDFWGQGTQVTVSS

SEQ ID NO: 1464 - protein, 123 aa, Synthetic construct
EVQLVESGGGLVQAGGSLKLSCAASGRTYAMGWFRQAPGKEREFVAHINALGTRTYYSDSVKGRFTISRDNAKNTEYLEMNNLKPEDTAVYYCTAQGQWRAAPVAVAAEYEFWGQGTQVTVSS

SEQ ID NO: 1465 - protein, 123 aa, Synthetic construct
EVQLVESGGGLVQAGGSLTLSCAASGRTYAMAWFRQAPGKEREFVAHINALGTRTYYSDSVKGRFTISRDNAKNTEYLQMNSLNPEDTAVYYCAAGGQWRAAPVADAAQYDFWGQGTQVTVSS

SEQ ID NO: 1466 - protein, 123 aa, Synthetic construct
EVQLVESGGGLVQAGGSLRISCAASGRTYAMAWFRQAPGKEREFVAHINALGTRTYYSDSVKDRFTISRDNAKNTEYLQMNSLKPEDTAVYYCVAGGQWRAAPVAAAESYDFWGQGTQVTVSS

SEQ ID NO: 1467 - protein, 127 aa, Synthetic construct
EVQLEVQLVESGGGLVQAGGSLKLSCAASGRTYAMGWFRQAPGKEREFVAHINALGTRTYYSDSVKGRFTISRDNAKNTEYLEMNNLKPEDTAVYYCTAQGQWRAAPVAVAAEYEFWGQGTQVTVSS

SEQ ID NO: 1468 - protein, 128 aa, Synthetic construct
EVQLEVQLVESGGGLVQPGGSLRLSCAVSISIFDIYAMDWYRQAPGKQRDLVATSFRDGSTNYADSVKGRFTISRDNAKNTLYLQMNSLKPEDTAVYLCHVSLYRDPLGVAGGMGVYWGKGALVTVSS

SEQ ID NO: 1469 - protein, 137 aa, Synthetic construct
EVQLEVQLEVQLVESGGGLVQPGGSLRLSCAATGFTLENKAIGWFRQTPGSEREGVLCISKSGSWTYYTDSMRGRFTISRDNAENTVYLQMDSLKPEDTAVYYCATTTAGGGLCWDGTTFSRLASSWGQGTQVTVSS

SEQ ID NO: 1470 - protein, 124 aa, Synthetic construct
EVQLEVQLEVQLVESGGGLVQPGGSLKLSCAASGFTFSTSWMYWLRQAPGKGLEWVSVINTDGGTYYADSVKDRFTISRDNAKDTLYLQMSSLKSEDTAVYYCAKDWGGPEPTRGQGTQVTVSS

SEQ ID NO: 1471 - protein, 131 aa, Synthetic construct
EVQLEVQLEVQLVESGGGLVQAGGSLKLSCAASGRTYAMGWFRQAPGKEREFVAHINALGTRTYYSDSVKGRFTISRDNAKNTEYLEMNNLKPEDTAVYYCTAQGQWRAAPVAVAAEYEFWGQGTQVTVSS

SEQ ID NO: 1472 - protein, 123 aa, Synthetic construct
EVQLLESGGGLVQAGGSLRLSCAASGRTYAMSWFRQAPGKEREFVSHINALGTRTYYADSVKGRFTISRDNSKNTLYLQMNSLRPEDTAVYYCTAQGQWRAAPVAVAAEYEFWGQGTQVTVSS

SEQ ID NO: 1473 - protein, 123 aa, Synthetic construct
EVQLLESGGGLVQPGGSLRLSCAASGRTYAMSWFRQAPGKEREFVSHINALGTRTYYADSVKGRFTISRDNSKNTLYLQMNSLRAEDTAVYYCTAQGQWRAAPVAVAAEYEFWGQGTQVTVSS

SEQ ID NO: 1474 - protein, 123 aa, Synthetic construct
EVQLLESGGGLVQPGGSLRLSCAASGRTYAMSWFRQAPGKEREFVAHINALGTRTYYADSVKGRFTISRDNSKNTLYLQMNSLRAEDTAVYYCTAQGQWRAAPVAVAAEYEFWGQGTQVTVSS

SEQ ID NO: 1475 - protein, 123 aa, Synthetic construct
EVQLLESGGGLVQPGGSLRLSCAASGRTYAMSWFRQAPGKEREFVSAINALGTRTYYADSVKGRFTISRDNSKNTLYLQMNSLRAEDTAVYYCTAQGQWRAAPVAVAAEYEFWGQGTQVTVSS

SEQ ID NO: 1476 - protein, 123 aa, Synthetic construct
EVQLLESGGGLVQAGGSLRLSCAASGRTYAMSWFRQAPGKEREFVSAINALGTRTYYADSVKGRFTISRDNSKNTLYLQMNSLRPEDTAVYYCTAQGQWRAAPVAVAAEYEFWGQGTQVTVSS

SEQ ID NO: 1477 - protein, 123 aa, Synthetic construct
EVQLLESGGGLVQAGGSLRLSCAASGRTYAMSWFRQAPGKEREFVAHINALGTRTYYADSVKGRFTISRDNSKNTLYLQMNSLRPEDTAVYYCTAQGQWRAAPVAVAAEYEFWGQGTQVTVSS

SEQ ID NO: 1478 - protein, 123 aa, Synthetic construct
EVQLLESGGGLVQPGGSLRLSCAASGRTYAMGWFRQAPGKEREFVAHINALGTRTYYADSVKGRFTISRDNSKNTLYLQMNSLRAEDTAVYYCTAQGQWRAAPVAVAAEYEFWGQGTLVTVSS

SEQ ID NO: 1479 - protein, 123 aa, Synthetic construct
EVQLLESGGGLVQPGGSLRLSCAASGRTYAMGWFRQAPGKEREFVAHINALGTRTYYADSVKGRFTISRDNSKNTLYLQMNSLRPEDTAVYYCTAQGQWRAAPVAVAAEYEFWGQGTLVTVSS

SEQ ID NO: 1480 - protein, 123 aa, Synthetic construct
EVQLLESGGGLVQPGGSLRLSCAASGRTYAMGWFRQAPGKEREFVAHINALGTRTYYADSVKGRFTISRDNSKNTVYLQMNSLRPEDTAVYYCTAQGQWRAAPVAVAAEYEFWGQGTLVTVSS

SEQ ID NO: 1481 - protein, 123 aa, Synthetic construct
EVQLLESGGGLVQPGGSLRLSCAASGRTYAMGWFRQAPGKEREFVAAINALGTRTYYADSVKGRFTISRDNSKNTLYLQMNSLRAEDTAVYYCTAQGQWRAAPVAVAAEYEFWGQGTLVTVSS

SEQ ID NO: 1482 - protein, 123 aa, Synthetic construct
EVQLLESGGGLVQPGGSLRLSCAASGRTYAMGWFRQAPGKEREFVAAINALGTRTYYADSVKGRFTISRDNSKNTLYLQMNSLRPEDTAVYYCTAQGQWRAAPVAVAAEYEFWGQGTLVTVSS

SEQ ID NO: 1483 - protein, 127 aa, Synthetic construct
EVQLVESGGGLVQPGGSLRLSCAASGLSLDTYAMSWFRQAPGKEREGVSCISSGHGMTYYADSVKGRFTISRDNSKNTLYLQMNSLQPEDTARYYCATESRYYCSDNWPAPQRYIYWGQGTQVTVSS

SEQ ID NO: 1484 - protein, 127 aa, Synthetic construct
EVQLVESGGGLVQPGGSLRLSCAASGLSLDTYAMSWFRQAPGKEREGITCISSGHGMTYYADSVKGRFTISRDNSKNTLYLQMNSLQPEDTARYYCATESRYYCSDNWPAPQRYIYWGQGTQVTVSS

SEQ ID NO: 1485 - protein, 127 aa, Synthetic construct
EVQLVESGGGLVQPGGSLRLSCAASGLSLDTYAMSWFRQAPGKEREGVSCISSGHGITYYADSVKGRFTISRDNSKNTLYLQMNSLQPEDTARYYCATESRYYCSDNWPAPQRYIYWGQGTQVTVSS

SEQ ID NO: 1486 - protein, 127 aa, Synthetic construct
EVQLVESGGGLVQPGGSLRLSCAASGLSLDTYAMSWFRQAPGKEREGVSCISSGHGLTYYADSVKGRFTISRDNSKNTLYLQMNSLQPEDTARYYCATESRYYCSDNWPAPQRYIYWGQGTQVTVSS

SEQ ID NO: 1487 - protein, 127 aa, Synthetic construct
EVQLVESGGGLVQPGGSLRLSCAASGLSLDTYAMSWFRQAPGKEREGVSCISSGHGFTYYADSVKGRFTISRDNSKNTLYLQMNSLQPEDTARYYCATESRYYCSDNWPAPQRYIYWGQGTQVTVSS

SEQ ID NO: 1488 - protein, 127 aa, Synthetic construct
EVQLVESGGGLVQPGGSLRLSCAASGLSLDTYAMSWFRQAPGKEREGITCISSGHGITYYADSVKGRFTISRDNSKNTLYLQMNSLQPEDTARYYCATESRYYCSDNWPAPQRYIYWGQGTQVTVSS

SEQ ID NO: 1489 - protein, 127 aa, Synthetic construct
EVQLVESGGGLVQPGGSLRLSCAASGLSLDTYAMSWFRQAPGKEREGITCISSGHGLTYYADSVKGRFTISRDNSKNTLYLQMNSLQPEDTARYYCATESRYYCSDNWPAPQRYIYWGQGTQVTVSS

SEQ ID NO: 1490 - protein, 127 aa, Synthetic construct
EVQLVESGGGLVQPGGSLRLSCAASGLSLDTYAMSWFRQAPGKEREGITCISSGHGFTYYADSVKGRFTISRDNSKNTLYLQMNSLQPEDTARYYCATESRYYCSDNWPAPQRYIYWGQGTQVTVSS

SEQ ID NO: 1491 - protein, 117 aa, Synthetic construct
EVQLVESGGGLVKPGGSLKLSCAASGFTFTTYAMSWVRQTPEKRLEWVATISSGGTYTYYPDSVKGRFTISRDNAKNALYLQMSSLRSEDTAMYYCATQGNYSLDFWGQGTSLTVSS

SEQ ID NO: 1492 - protein, 117 aa, Synthetic construct
EVQLVESGGGLVKPGGSLRLSCAASGFTFTTYAMSWVRQAPGKGLEWVSSISSGGTYTYYADSVKGRFTISRDNAKNSLYLQMNSLRAEDTAVYYCATQGNYSLDFWGQGTTVTVSS

SEQ ID NO: 1493 - protein, 117 aa, Synthetic construct
EVQLVESGGGLVKPGGSLRLSCAASGFTFTTYAMNWVRQAPGKGLEWVSSISSGGTYTYYADSVKGRFTISRDNAKNSLYLQMNSLRAEDTAVYYCATQGNYSLDFWGQGTTVTVSS

SEQ ID NO: 1494 - protein, 117 aa, Synthetic construct
EVQLVESGGGLVKPGGSLRLSCAASGFTFTTYAMSWVRQAPGKGLEWVSTISSGGTYTYYADSVKGRFTISRDNAKNSLYLQMNSLRAEDTAVYYCATQGNYSLDFWGQGTTVTVSS

SEQ ID NO: 1495 - protein, 120 aa, Synthetic construct
EVQLVESGGGLVKPGGSLRLSCAASGFTFSTYSMNWVRQAPGKGLEWVSSISSGSSYIYYTDSVKGRFTISRDNAKNSLYLQMNSLRAEDTAVYYCARFGSYYYFGFDVWGQGTTVTVSS

SEQ ID NO: 1496 - protein, 122 aa, Synthetic construct
EVQLVESGGGLVQTGRSLRLSCAASGFTFDDYAMNWVRQAPGKGLEWVSGISWNSGNIGYADSVKGRFTISRDNAKNSLYLQMNSLRAEDTALYYCVKYIGQQLVQDYFDYWGQGTLVTVSS

SEQ ID NO: 1497 - protein, 125 aa, Synthetic construct [sequence omitted]

SEQ ID NO: 1498 - protein, 118 aa, Synthetic construct
EVQLVESGGGLVQSGGSLRLSCAASGFTFSTYAMSWVRQAPGKGLEWVSAISSSGVSTHYADSVKGRFTISRDNSKNTLYLQVNSLRAEDTAVYFCAKGSAWYYFDFWGQGTLVTVSS

SEQ ID NO: 1499 - protein, 118 aa, Synthetic construct
EVQLVESGGGLVQPGGTLRLSCAASGFTFSTYAMTWVRQAPGKGLEWVSSISSSGVSTYYADSVKGRFTISRDNSKNTVYLHMNSLRAEDTALYYCAQGSSWYYFDYWGQGTLVTVSS

SEQ ID NO: 1500 - protein, 124 aa, Synthetic construct
QVQLVESGGGLVQPGGSLRLSCAASGFTFSTYAMNWVRQAPGKGLEWVSGISGSGGSSYYADSVKGRFTISRDNSKSTLYLQMNSLRAEDTAVYYCTKAGEQFALYYYYGMDVWGQGTTVTVSS

SEQ ID NO: 1501 - protein, 119 aa, Synthetic construct
EVQLVESGGGLVQPGGSLRLSCAASGFSFSSYAMNWVRQAPGKGLEWVSGISGSGGSTYYADSVKGRFTISRDNSKNTLYLQINSLRVEDTAVYYCARWQRLEDWFDPWGQGTLVTVSS

SEQ ID NO: 1502 - protein, 118 aa, Synthetic construct
QVQLVESGGGLVQPGGSLRLSCAASGFTFSTYAMSWVRQAPGKGLEWISAISSSGVSTYYADSVKGRFTISRDNSKNTLYLHLNSLRADDTAVYHCAQGNSWYYFDYWGQGTTVTVSS

SEQ ID NO: 1503 - protein, 120 aa, Synthetic construct
EVQLVESGGGLVQPGGSLRLSCAASGFTFSTYAMTWVRQAPGKGLEWVSAISGSGHNTYYADSVKGRFTISRDNSKNTLYLQMNSLRAEDTAVYYCAKLGIVGDTPFDYWGQGTMVTVSS

SEQ ID NO: 1504 - protein, 122 aa, Synthetic construct
QVQLVESGGGLVQSGGSLRLSCEASGFTFINYAMNWVRQAPGKGLEWVSAIDVSGGSTYYADSVKGRFTISRDNSKNTLYLQMNSLRAEDTAVYYCAKPHSLRFVEWSLDVWGQGTTVTVSS

SEQ ID NO: 1505 - protein, 120 aa, Synthetic construct
EVQLVESGGGLVQPGESLRLSCAASGFIFSTYWMNWVRQAPGKGLEWVANIKQDGSEKYYVDSVKGRFTISRDNAKNSLSLQMSSLRAEDTAVYYCARDHIVGAPYFDYWGQGTLVTVSS

SEQ ID NO: 1506 - protein, 125 aa, Synthetic construct
EVQLVESGGGLVQPGRSLRLSCAASGFTFDDYAMNWVRQAPGKGLEWVSGISWNSGSIGYADSVKGRFTISRDNAKNSLYLQMNSLRTEDTALYYCAKDGAVVAAATSYWYFDLWGRGTLVTVSS

SEQ ID NO: 1507 - protein, 125 aa, Synthetic construct
QVQLVQSGGGLVQPGRSLRLSCAASGFTFDDYAMNWVRQGPGKGLEWVSGISWNSGSIGYADSVKGRFTISRDNAKKFLYLQMNSLRAEDTALYYCAKDGVVVAAATSYWYFDLWGRGTLVTVSS

SEQ ID NO: 1508 - protein, 125 aa, Synthetic construct
EVQLVESGGGLVQPGRSLRLSCAASGFTFDDYAMNWVRQAPGKGLEWVSGISWNSGSIGYADSVKGRFTISRDNAKNSLYLQMNSLRTEDTALYYCAKDGVVVADANSYWYFDLWGRGTMVTVSS

SEQ ID NO: 1509 - protein, 125 aa, Synthetic construct
EVQLVESGGGLVQPGRSLRLSCAASGFTFDDYAMNWVRQAPGKGLEWVSGISWNSGSIGYADSVKGRFTISRDNAKNSLYLQMNSLRAEDTALYYCAKDGVVVAAATSYWYFDLWGRGTLVTVSS

SEQ ID NO: 1510 - protein, 125 aa, Synthetic construct
EVQLVESGGGLVQPGRSLRLSCAASGFTFDDYAMNWVRQAPGKGLEWVSGISWNSGSIGYADSVKGRFTISRDNAKNSLYLQMNSLRTEDTAWYYCAKDGAVVAAATSHWYFDLWGRGTMVTVSS

SEQ ID NO: 1511 - protein, 125 aa, Synthetic construct
EVQLVESGGGLVQPGRSLRLSCAASGFTFDDYAMNWVRQAPGKGLEWVSGITWNSGSIGYADSVKGRFTISRDNAKNSLYLEMNSLRAEDTALYYCAKDGVVVAAATSYWYFDLWGRGTLVTVSS

SEQ ID NO: 1512 - protein, 121 aa, Synthetic construct
QVQLVESGGDLVQPGGSLRLSCAASGFTFNNYAMNWVRQAPGKGLEWVSAISDSGIGTYYADSVKGRFTISRDNSKNTLYLQMNSLRAEDTAVYYCAKGLFGTYYALFDYWGQGTPVTVSS

SEQ ID NO: 1513 - protein, 121 aa, Synthetic construct
EVQLVESGGDLVQPGGSLRLSCAASGFTFNSYAMNWVRQAPGKGLEWVSAVSNTGSGTYYADSVKGRFTISRDNSKNTLYLQMNSLRAEDTAVYYCAKGLFGTYYALFDYWGQGTTVTVSS

SEQ ID NO: 1514 - protein, 121 aa, Synthetic construct
EVQLVESGGDLVQPGGSLRLSCAASGFTFNSYAMNWVRQAPGKGLEWVSAISGSGGSTYYADSVKGRFTISRDNSKNTLYLQMNSLRAEDTAVYYCAKGLFGTYYALFDYWGQGTLVTVSS

SEQ ID NO: 1515 - protein, 126 aa, Synthetic construct
EVQLVETGGGVVQPGGSLRLSCEASGFTIGTYAMHWVRQFPGKGLDWVAVISFDGTTEYYTDAVKGRFTISRDNAKNTLYLQMNYLRGDDTAIYFCARDFTSSGETGSWTQVPDLWGQGTLVTVSS

SEQ ID NO: 1516 - protein, 127 aa, Synthetic construct
CQVQLVESGGGVVQPGGSLRLSCEASGFTIGTYAMHWVRQFPGKGLDWVAVISFDGTTEYYTDAVKGRFTISRDNAKNTLYLQMNYLRGDDTAIYFCARDFTSSGETGSWTQVPDLWGQGTLVTVSS

SEQ ID NO: 1517 - protein, 123 aa, Synthetic construct
TRVLSQVQLVQSGAEVKKPGASVKVSCKASGYTFSGYSTHWLRQVPGQGLEWIGWDNPSSGDTTYAENFRGRVTLTRDTSITTDYLEVRGLRSDDTAVYYCARGGDDYSFDHWGQGTLVTVSS

SEQ ID NO: 1518 - protein, 119 aa, Synthetic construct
QVQLQESGGGLVQPGGSLRLSCAASGSIFSTYAMGWYRQAIGKQRELVATITSSGKTNYAASVKGRFTISRDITKNTMYLQMNSLKPEDTAVYYCGADRWVLTRWSNYWGQGTQVTVSS

SEQ ID NO: 1519 - protein, 117 aa, Synthetic construct
QVQLQESGGGLVQPGGSLRLSCSASGFTFGTYAMRWVRQTSGKGLEWVSGIGVSGDAYYTDSVRGRFTISRDNSKNTLYLQMNTLRAEDTATYYCTRKSSTTSNDYWGRGTLVTVSS

SEQ ID NO: 1520 - protein, 118 aa, Synthetic construct
QVQLLQSAGGLVQPGGSLRLSCAASGFTFSTYAMNWVRQAPGKGLEWVSGISGSGGSTNYADSVKGRFTISRDSSKNTLFLQMNSLRAEDTAVYYCAKDYGSGWYDYWGQGTLVTVSS

SEQ ID NO: 1521 - protein, 128 aa, Synthetic construct
QVRLVQSGAEVKKPGSSVKVSCKASGDTFSSYAISWVRQAPGQGLEWMGGIIPFFVTTTYAQNFQGRVTITTDESTRTAYMELSSLRSEDSAVYYCARDRPCISSAGTRYHYCVMDVWGQGTTVTVSS

SEQ ID NO: 1522 - protein, 122 aa, Synthetic construct
LVQLVQSGGGLVKPGGSLRLSCAASGFTFSTYSMNWVRQAPGKGLEWVSSISSSSSYIYYADSVKGRFTISRDNANNSLYLQMNSLRAEDTAVYYCARGNTVAQRLDVFDYWGQGTLVTVSS

SEQ ID NO: 1523 - protein, 118 aa, Synthetic construct
QLQLVESGGGLVQPGGSLRLSCAASGFTFSSYAMNWVRQAPGKGLEWVSAISGSGGNTYYADSVKGRFTISRDNSNNALYLQMNSLRVEDTAVYYCARDASYYADDYWGQGTLVTVSS

SEQ ID NO: 1524 - protein, 118 aa, Synthetic construct
QVQLQESGGGLVKPGGSLRLSCAGSGFIFNTYSMNWVRQSPGKGLEWVSSTGGSGKNTFYADSVRGRFTISRDNAKNSLYLQMNSLRAEDTAVYYCAREDSSGSFDYWGQGTLVTVSS

SEQ ID NO: 1525 - protein, 124 aa, Synthetic construct
EVQLVESGGGLVQPGGSLRLSCSASGFTFSVYAMNWVRQAPGKGLEWVSGISFSGGATMYADSVKGRFTISRDNAKNTLYLQMNSLKPEDTGVYYCAKGMSPNIEYAQGPVAYRGQGTQVTVSS

SEQ ID NO: 1526 - protein, 126 aa, Synthetic construct
EVQLVESGGGLVQPGGSLRLSCAASGFAFSTYAMGWVRQAPGKGLEWVSCISNGGLRTMYADSVKGRFTISRDNAKNTLYLQMNSLKAEDTAVYYCAKYWAPWPMDVSRLDDYDNKGQGTQVTVSS

SEQ ID NO: 1527 - protein, 123 aa, Synthetic construct
QVQLQESGGGLVQAGGFLRLSCAASGRSFNTYAMGWFRQAPGKEREFVAGITRSGTATDYADSVKGRFTISRDNARNTVYLQMNRLKSEDSAVYYCAAHASYDRMIYSEYKYWGQGTQVTVSS

SEQ ID NO: 1528 - protein, 123 aa, Synthetic construct
QVQLQQSGGGLVQAGGFLRLSCAASGRSFNTYAMGWFRQAPGKEREFVAGITRSGTATDYIDSVKGRFTISRDNARDTVYLQMNRLNPEDSAVYYCAAHANYDRMINSEYKYWGQGTQVTVSS

SEQ ID NO: 1529 - protein, 123 aa, Synthetic construct
QVQLQESGGGLVQAGGFLRLSCAASGRSFNTYAMGWFRQAPGKEREFVAGITRSGTATDYIDSVKGRFTISRDNARDTVYLQMNRLNPEDSAVYYCAAHANYDRMINSEYKYWGQGTQVTVSS

SEQ ID NO: 1530 - protein, 123 aa, Synthetic construct
QVQLQQSGGGLVQAGGFLRLSCAASGRSFNTYAMGWFRQAPGKEREFVAGITRSGTATEYADSVKGRFTISRDNARNTVLLQMNRLKPEDSAVYYCAAHANYDRMINSEYKYWGQGTQVTVSS

SEQ ID NO: 1531 - protein, 123 aa, Synthetic construct
QVQLQESGGGLVQAGGFLRLTCAASGRSFNTYAMGWFRQAPGKDRKFVAGITRSGTVTDYADSVKGRFTISRDNARNTVYLQMNRLKPEDSAVYYCAGHASYDRMINSEYKYWGQGTQVTVSS

SEQ ID NO: 1532 - protein, 123 aa, Synthetic construct
QVQLQESGGGLVQAGGFLRLSCAASGRSFNTYAMGWFRQAPGKEREFVAGITRSGTATDYADSVKGRFTISRDNARNTVYLQMNRLKPEDSAVYYCAAHASYDRMIYSEYKYWGQGTQVTVSS

SEQ ID NO: 1533 - protein, 124 aa, Synthetic construct
QVQLQESGGGLVQAGGSLRLSCAASGSTFSTYAMGWFRQAPGKEREFVAAFWWTDEQTFYADSVKGRFTISRGNAKNTVDLQMNSLKPEDTAVYACAAMSKPYNLWRTDSYDYWGQGTQVTVSS

SEQ ID NO: 1534 - protein, 120 aa, Synthetic construct
EVQLVESGGGLVQPGGSLRLSCAASGFTFSTYAMSWVRQAPGKGLEWVSAISGSGGSTYYADSVKGRFTISRDNSKNTLYLQMNSLRAEDTAVYYCAREGGKWYYGMDVWGRGTLVTVSS

SEQ ID NO: 1535 - protein, 126 aa, Synthetic construct
MELALSWVFLFTLLRGVQAEEQLVESGGGLVQPGGSLKLSCLASGFIFSSYAMNWVRQAPGKGLEWISAISRSDSNRYYTDSVKGRFTISRDDGTNTLYLQMSSLRPEDTAVYYCSRYRDYYALDI

SEQ ID NO: 1536 - protein, 115 aa, Synthetic construct
EVQLVESGGGLVQPGGSLRLSCSASGFTFTTYAMSWVRQAPGRGLEWVSSISGTGVSTYYADSVKGRFTISRDNSKNALYLQMNSLTAEDTAVYYCAKDSGTYHWGQGTLVTVSS

SEQ ID NO: 1537 - protein, 99 aa, Synthetic construct
MVNQANGKKQEIAKLENLSNDEMLRYNTAIDNVVKQYNEGKLNITAAMNALNSIKQAAQEVAQKNLQNKDYCQTKLPELDQHRFPVNQRNQKKYLAGFP

SEQ ID NO: 1538 - protein, 122 aa, Synthetic construct
EVQLLESGGGLVQPGGSLRLSCAASGFTFNTFAMNWVRQAPGKGLEWVSAITGSGGSTYYADSVKGRFTISRDNSKNTLYLQMNSLRAEDTAVYYCATPITVVRGVSAFDIWGQGTMVTVSS

SEQ ID NO: 1539 - protein, 120 aa, Synthetic construct
EVQLLESGGGLVQPGGSLRLSCAASGFTFNTFAMNWVRQAPGKGLEWVSAISGSGGSTYYADSVKGRFTISRDNSKNTLYLQMNSLRAEDTAVYYCAALVRGVRDAFDIWGQGTMVTVSS

SEQ ID NO: 1540 - protein, 122 aa, Synthetic construct
EVQLLESGGGLVQPGGSLRLSCTASKFTFNTYAMNWVRQAPGKGLEWVSAISGSGISSYYADSVNGRFTISRDNSKNTLYLQMNSLRAEDTAVYYCATPIVVVSIDMAFDIWGQGTMVTVSS

SEQ ID NO: 1541 - protein, 121 aa, Synthetic construct
EVQLLESGGGLVQPGGSLRLSCAVSGFTFSTFAMNWVRQAPGKGLEWVSAISGSGGNTYYADSVKGRFIISRDNSKNTLYLQMNSLRAEDTAVYYCATIPVKLGDDAFDIWGQGTMVTVSS

SEQ ID NO: 1542 - protein, 123 aa, Synthetic construct
MRGTAGVPDQPVPTPTPSVPTSSSPVPKPPTQGNKKWCVPKAEATDAQLQSNIDYVCSQSGMDCGPIQANGACFNPNTVRAHASYAMNSWYQSKGRNDFDCDFSGTGAITSSDPSNGSCSFLS

SEQ ID NO: 1543 - protein, 120 aa, Synthetic construct
QVQLQQPGAELVRPGASVKLSCKASGYSFTTYWMNWVKQRPGQGLEWIGMIHPSDSETRLNQKFKDKATLTVDKSSSTAYMQLSSPTSEDSAVYYCARSTMIATRAMDYWGQGTSVTVSS

SEQ ID NO: 1544 - protein, 126 aa, Synthetic construct
EVQLVESGGGLVQPGGSLRLSCAASGFSFGFYAMNWVRQAPGKGLEYVSGVSGGGGSTYYADSVKGRFTISRDNSKNTLYLQMKSLRAEDTAIYYCAKDQSYCSGGSCHPYYLDYWGQGTLVTVSS

SEQ ID NO: 1545 - protein, 126 aa, Synthetic construct
EVQLVESGGGLVQPGGSLRLSCAASGFSFRFYAMNWVRQAPGKGLEYVSGISGGGGTTYYADSVKGRFTISRDNSKNTLYLQMKSLRAEDTAIYYCAKDQSYCSGAGCHPYYLDYWGQGTLVTVSS

SEQ ID NO: 1546 - protein, 124 aa, Synthetic construct
EVQLVESGGGLVKPGGSLRLSCAASGITFQYYAMNWVRQAPGKGLEWVSSIGGRGDTTYYTDSVKGRFTISRDNSKSTLYLQMNSLRAEDTAVYYCAKEPFDSSGDHRGVFDYWGQGTLVTVSS

SEQ ID NO: 1547 - protein, 120 aa, Synthetic construct
EVQLVESGGDVVQPGRSLRLSCAASGFAFSIYAMNWVRQAPGKGLEWVALISTSGTEHYADSVKGRFTISRDNSKNTLFLQINSLRVEDTAVYYCARDLDSTGYYENNYWGQGTLVTVSS

SEQ ID NO: 1548 - protein, 119 aa, Synthetic construct
QVQLVESGGGVVQPGRSLRLSCAASGFTFSTYAMHWVRQAPGKGLEWVAVVSYDGRTKDYADSVKGRFTISRDNSKNTLYLQMNSLRTEDTAVYFCARERFSGAYFDYWGQGTLVTVSS

SEQ ID NO: 1549 - protein, 124 aa, Synthetic construct
QIQLQQSGPELVRPGTSVKISCKASGYTFLTYWMNWVKQRPGQGLEWIGQIFPASGSTYYNEMFKDKATLTVDTSSSTAYMQLSSLTSEDTAVYFCARSENIYYINFQYYFAYWGQGTTLTVSS

SEQ ID NO: 1550 - protein, 119 aa, Synthetic construct
QVQLVQSGGGLVQPGGSLRLSCAASEFTFGTYAMTWVRQAPGKGLEWVSAVSGSGGSTYYADSVKGRFTISRDNSRNTLYLQMNSLRADDTAVYYCARGPVLRYGFDIWGQGTMVTVSS

SEQ ID NO: 1551 - protein, 121 aa, Synthetic construct
QVQLVESGGGLVQAGGSLRLSCAASGRAPETYAMGWFRQAPGKEREFVAHIIVTGDRTYYADSVKGRFTISRNNAKNTVYLQMNSLKPEDTAVYYCAADRSARWEPGTHYWGQGTQVTVSS

SEQ ID NO: 1552 - protein, 120 aa, Synthetic construct
QSVEESGGRLVTPGTPLTLTCTVSGIDLSTYAMSWVRQAPGKGLEWIGIIYGSGYTYYASWAKGRATISKTSSTTVDLKITSPTTEDTATYFCASGYGISSGNFLHFNLWGQGTLVTVSS

SEQ ID NO: 1553 - protein, 118 aa, Synthetic construct
QSVEESGGRLVKPDESLTLTCTVSGIDLSTYAMGWVRQAPGKGLEYIGMISTGGSAYYASWAQGRFTISRTSTTVDLKMTSLTTEDTATYFCARLRDPYSYRTYFNLWGPGTLVTVSS

SEQ ID NO: 1554 - protein, 115 aa, Synthetic construct
QSLEESGGRLVTPGTPLTLTCTASGFSLSTYAMGWVRQAPGEGLEWIGNINTDSGDTWYARWAKGRFTISTTSSTTVDLKITSPTIEDTATYFCARNPGDDVNLWGQGTLVTVSS

SEQ ID NO: 1555 - protein, 118 aa, Synthetic construct
QSVEESGGRLVTPGTPLTLTCTVSGFSLSTYAMNWIRQAPGKGLEWIGTITTGGSTFFASWAKGRFTISKTSTTVDLKITSPTTEDTATYFCARGGDTGYGFSYFDLWGQGTLVTVSS

SEQ ID NO: 1556 - protein, 118 aa, Synthetic construct
QSVEESGGRLVTPGTPLTLTCTVSGFSLSTYAMSWVRQAPGKGLEWIGMNTRSGIIYYASWAKGRFTISKTSTTVHLKITSPTTEDTATYFCARDLYADVSGYYLGLWGPGTLVTVSS

SEQ ID NO: 1557 - protein, 116 aa, Synthetic construct
QSVEESGGRLVTPGTPLTLTCTVSGFSLSTYAMGWVRQAPGKGLEWIGIIYTGGSTYYASWAEGRFTISKTSTTVDLKITSPTPEDTATYFCTRDLGATYDYFDLWGQGTLVTVSS

SEQ ID NO: 1558 - protein, 118 aa, Synthetic construct
QSVEESGGRLVTPGGSLTLTCSVSGIDLSSYAMNWVRQAPGKGLEWIGIISTGGSTYYANWAKGRFTISKTSTTVDLKITSPTTEDTATYICARDVGGTTVPYYFDLWGPGTLVTVSS

SEQ ID NO: 1559 - protein, 117 aa, Synthetic construct
QSVEESGGRLVTPGTFLTLTCTVSGFSLSSYAMNWVRQSPGKGLEWIGIIYSDDIAYYASWAKGRFTISKTSTTVTLKMTSLTVADTATYFCARGDGDRSIWSFDLWGPGTLVTVSS

SEQ ID NO: 1560 - protein, 119 aa, Synthetic construct
QSLEESGGRLVTPGTPLTLTCTASGFSLTNYAMNWVRQAPGKGLEWIGFINYDGNTYYANWAKGRFTISRTSTTVDLKITSPTTEDTATYFCARGGDGYTHIPDTFDPWGPGTLVTVSS

SEQ ID NO: 1561 - protein, 115 aa, Synthetic construct
QSLEESGGRLVTPGTPLTLTCTVSGFSLSTYAMIWVRQAPGEGPEWIGLIAGGGNTWYASWAKGRFTISKTSTTVDLKITSPTTEDTATYFCARADYLGYGNNFWGQGTLVTVSS

SEQ ID NO: 1562 - protein, 117 aa, Synthetic construct
QSVEESGGRLVTPGTPLTLTCTVSGFSLSTYAMIWVRQAPGKGLEWIGVVYDNGYISHATWVKGRFTISKTSTTVGLEITSPTTEDTATYFCARSADGSWSTYFNLWGQGTLVTVSS

SEQ ID NO: 1563 - protein, 59 aa, Synthetic construct
MKFVATLIACGLSGLALAAPTATVDSLEKRGPNDAAFGYASLNGGTTGGAGGTTTTVSS

SEQ ID NO: 1564 - protein, 59 aa, Synthetic construct
MKFVATLIACGLSGLALAAPTATVNSLGKRAADDAAFGYASLNGGTTGGAGGTTTTVSS

SEQ ID NO: 1565 - protein, 59 aa, Synthetic construct
MKFVATLIACGLSGLALAAPTATVDSLGKRAADDAAFGYASLNGGTTGGAGGTTTTVSS

SEQ ID NO: 1566 - protein, 144 aa, Synthetic construct
MRHARRRVVRRVTRLAAVGGLLLGGAMVTRAVASEPPATTAVPRTYAMEAGRTGEDLVSRLGSSRTAGTWIGADGKPVVAVTDEQAAAEVREAGARPKVVGHSMDELKSAARTLRSAPRVAGTAWSMDYRTNEVVVQGDSTVSA

SEQ ID NO: 1567 - protein, 61 aa, Synthetic construct
MTNFKWIVAAAGLLFGQVLAAPTATSTHAKRATVSDAAFGYASLNGGTTGGAGGTTTTVSS

SEQ ID NO: 1568 - protein, 61 aa, Synthetic construct
MTNFKWIVAAAGLLSGQVLAAPTATSTHAKRATVSDAAFGYASLNGGTTGGAGGTTTTVSS

SEQ ID NO: 1569 - protein, 65 aa, Synthetic construct
MQNLKFLIAAVSCLGPALAAPTPTSNFINSNFNKRASVEDSAFGYASLNGGTTGGAGGTTTTVSS

SEQ ID NO: 1570 - protein, 142 aa, Synthetic construct
MSLHGKRKEIYKYEAPWTVYAMNWSVRPDKRFRLALGSFVEEYNNKVVILDVRVPCTPVARLNNHRACVNGIAWAPHSSCHICTAADDHQALIWDIQQMPRAIEDPILAYTAEGEINNVQWASTQPDWIAICYNNCLEILRV

SEQ ID NO: 1571 - protein, 125 aa, Synthetic construct
QVQLVESGGGLVQPGGSLRLSCAASGFSFTTYGMNWVRQAPGKGLEWVSYISSSSSTIYYTDSVKGRFTISRDNAKNSLYLQMNSLSAGDTAVYYCARGGDNSRGYYYIAGGDYWGQGTLVTVSS

SEQ ID NO: 1572 - protein, 124 aa, Synthetic construct
QVQLVESGGGLVQPGGSLRLSCAASGFSFTTYGMNWVRQAPGKGLEWVSYISSSSSTIYYTDSVKGRFTISRDNAKNSLYLQMNSLSAGDTAVYYCARGGDNSRGYYYIAGGDYWGQGTLVTVS

SEQ ID NO: 1573 - protein, 120 aa, Synthetic construct
QVQLVETGGGMVQPGGSLRLSCAASGFMFSTYAMSWVRQASGKGLEWVSLISGTGSVTKYADSVKGRFTISRDNSKNMVYLQMNNLGADDTAVYYCANSDYGDYARFDHWGQGTLVTVSS

SEQ ID NO: 1574 - protein, 118 aa, Synthetic construct
EVQLLESGGGLVQPGGSLRLSCAASGFTFNSYAMNWVRQAPGKGLEWVSAISGSGGSTYYADSVKGRFTISRDNSKNTLYLQMNSLRAEDTAVYYCAKKYYVGPADYWGQGTLVTVSS

SEQ ID NO: 1575 - protein, 118 aa, Synthetic construct
EVQLLESGGGLVQPGGSLRLSCAASGFTFNSYAMNWVRQAPGKGLEWVSAISGSGGSTYYADSVKGRFTISRDNSKNTVYLQMNSLRAEDTAVYYCAKKYYVGPADYWGQGTLVTVSS

SEQ ID NO: 1576 - protein, 118 aa, Synthetic construct
EVQVLESGGGLVQPGGSLRLSCAASGFTFNSYAMNWVRQAPGKGLEWVSAISGSGGSTYYADSVKGRFTISRDNSKNTLYLQMNSLRAEDTAVYYCAKKYYVGPADYWGQGTLVTVSS

SEQ ID NO: 1577 - protein, 129 aa, Synthetic construct
EVQLLESGGGLVKPGQSLKLSCAASGFTFTTYAMHWVRQPPGKGLEWVAVLSYDGNYKYYADSVQGRFTISRDNSKNTLYLQMNSLRAEDTAVYYCAKDSRLRSLLYFEWLSQGYFNPWGAGTTLTVSS

SEQ ID NO: 1578 - protein, 129 aa, Synthetic construct
EVQLLESGGGLVKPGQSLKLSCAASGFTFTTYAMHWVRQPPGKGLEWVAVVSFDGNNRYYADSVQGRFTISRDNSKNTLYLQMNSLRAEDTAVYYCAKDSQLRSLLYFEWLSSGVLDYWGQGAMVTVSS

SEQ ID NO: 1579 - protein, 129 aa, Synthetic construct
EVQLLESGGGLVKPGQSLKLSCAASGFTFTTYAMHWVRQPPGKGLEWVAVVSYDGNNKYYADSVQGRFTISRDNSKNTLYLQMNSLRAEDTAVYYCAKDSKLRSLLYFEWLSSGLLDYWGQGAMVTVSS

SEQ ID NO: 1580 - protein, 129 aa, Synthetic construct
EVQLLESGGGLVKPGQSLKLSCAASGFSFSTYAMHWVRQPPGKGLEWVAVVSYDGNYKYYADTVQGRFTISRDNSKNTLYLQMNSLRAEDTAVYYCAKDSRLRSLLYFEWLSQGYFNPWGQGTTLTVSS

SEQ ID NO: 1581 - protein, 129 aa, Synthetic construct
EVQLLESGGGLRKPGQSLKLSCAASGFSFSTYAMHWVRQPPGKGLEWVAVVSYDGNYKYYADSVQGRFTISRDNSKNTLYLQMNSLRAEDTAVYYCAKDSRLRSLLYFEWLSQGYFNPWGQGTTLTVSS

SEQ ID NO: 1582 - protein, 129 aa, Synthetic construct
QVQLVQSGGGVVQPGRSLRLSCVASGFTFSTYAMHWVRQAPGRGLEWVAVISYDGNYKYYADSVKGRFSISRDNSNNTLHLEMNTLRTEDTALYYCAKDSQLRSLLYFEWLSQGYFDPWGQGTLVTVTS

SEQ ID NO: 1583 - protein, 121 aa, Synthetic construct
EELVLESGGGLVQPGGSLRLSCAASGFMFSTYAMSWVRQAPGKGLEWVSLISGRDGSTYYADSVKGRFTISRDISRNTLYLHLNSLRAEDTAVYYCAKDTAVVPGYGLDVWGQGTTVTVSS

SEQ ID NO: 1584 - protein, 121 aa, Synthetic construct
EELVLESGGGLVQPGGSLRLSCAASGFMFSTYAMSWVRQAPGKGLEWVSLISGRDGNTYYADSVKGRFTISRDNSRNTLYLQLNSLRAEDTALYYCAKDTAVVPGYGMDVWGQGTTVTVSS

SEQ ID NO: 1585 - protein, 121 aa, Synthetic construct
EVQLVESGGGLVQRGGSLRLSCAASGFSFSSYAMNWVRQAPGKGLEWVSTISDSGGSTYYADSVKGRFTISRDNSKNTLSLQMNSLRAEDTAVYYCAKDQGGSYPYYFHYWGQGTLVTVSS

SEQ ID NO: 1586 - protein, 119 aa, Synthetic construct
EVQLVESGGGLVRPGGSLRLSCAASGFTFSTYAMAWVRQTPGKGLEGVSAIGGSGDSTYYVDSVKGRFTISRDNSKSTLFLQMNSLRAEDTAVYYCVKVRNYDGSFDIWGQGTMVTVSS

SEQ ID NO: 1587 - protein, 144 aa, Synthetic construct
QVQLVESGGGVVQPGRSLRLSCAASGFTFSTYAMHWVRQAPGKGLEWVALISYDATNKYYVDSVKGRFTISRDNSKNTLYLQVSSLTAEDTAVYYCAKDLGGIKNDEWGTDYYDISVSYPVQDPRAVAGIFDVWGHGTMVSVSS

SEQ ID NO: 1588 - protein, 120 aa, Synthetic construct
EVQLVESGGDLVQPGGSLRLSCAASGFTFNNYAMNWVRQAPGKGLEWVSGSSGSGGNTYHADSVKGRFTISRDNSNNALYLQMNSLRAEDTAVYFCAKQGDWNWGAFDIWGQGTMVTVSS

SEQ ID NO: 1589 - protein, 119 aa, Synthetic construct
QVQLVQSGAEVKKPGSSVKVSCKASGGTFRTYAMHWVRQAPGQGLEWMGGIVPYHGITDYAQKFQGRVTITADESTSTAYMELSSLRSEDTAVYYCARDDYSTYAFAYWGQGTLVTVSS

SEQ ID NO: 1590 - protein, 119 aa, Synthetic construct
QVQLVQSGAEVKKPGSSVKVSCKASGGTFRTYAMHWVRQAPGQGLEWMGGIIPIFGIANYAQKFQGRVTITADESTSTAYMELSSLRSEDTAVYYCARDDYSTYAFAYWGQGTLVTVSS

SEQ ID NO: 1591 - protein, 137 aa, Synthetic construct
MGKIKPLTGKALLQRLKELDGVSRKEAAKLCGYYRVTKSGEVRVNLGKFYEALLAAGGLEVHSSEKEVNSQSGRGRSPSYRVKVHQNGQIVIGAAYTTAMNLKPGDTFKIQQGYKHIHLYLIDSEIDSEDVNGAPRN

SEQ ID NO: 1592 - protein, 62 aa, Synthetic construct
MKFLGLLNLAALASAVPTPTVQQVGKTLGKRAAITDAANIGYATENGGTTGGAGGATVTVSS

SEQ ID NO: 1593 - protein, 66 aa, Synthetic construct
MKFTAALATVFAGLVAATPTPTVDNVADRAHLVKRASISDKATIGYATLNGGTSGGAGGTVTTVSS

SEQ ID NO: 1594 - protein, 118 aa, Synthetic construct
VQLQASGGGFVQPGGSLRLSCAASGSTYETYAMGWFRQAPGKEREFVSAISASPTIEGYYADSVKGRFTISRDNSKNTVYLQMNSLRAEDTATYYCATWSKMGISIYWGQGTQVTVSS

SEQ ID NO: 1595 - protein, 123 aa, Synthetic construct
EVQLLESGGGLVQPGGSLRLSCTASGFTFNMYEMSWVRQAPGKGLEWVSGISRRGFTTYYADSVKGRFTISRDNSKNTLYLQMNSLRAEDTAVYYCAKEPITYAMRYARFDYWGQGTLVTVSS

SEQ ID NO: 1596 - protein, 119 aa, Synthetic construct
EVQLLESGGGLVQPGGSLRLSCAASGFTFSDYAMNWVRQAPGKGLEWVSGIKSGGSSKYYADSVKGRFTISRDNSKNTLYLQMNSLRAEDTAVYYCAKHVDFYRALDYWGQGTLVTVSS

SEQ ID NO: 1597 - protein, 118 aa, Synthetic construct
EVQLVESGGGLVQPGGSLRLSCAASGFTFSTYWMNWVRQAPGKGLEWVANIKPDGSDKYYVDSVKGRFTISRDNAKNSLYLQMNSLRDEDTAVYYCARGDGSGWNVYWGQGTLVTVSS

SEQ ID NO: 1598 - protein, 119 aa, Synthetic construct
EVQLVQSGGGLVQPGGSLRLSCEASGFIFKTYAMSWVRQLPGRGLEWVSAISATGGSTFYAESVKGRLTISRDTAKNTVYLQMNNLRAEDTAMYYCAKGSTAVYLFDSWGQGTLVTVSS

SEQ ID NO: 1599 - protein, 121 aa, Synthetic construct
QLQESGGGLVQPGGSLRLSCAASGFAFSTYAMSWVRQAPGKGLEWVSGINGGGGNTYYADSVKGRFTISRDNAKNTLYLQLNSLKTEDTAMYYCGQGAYWAYCNGGYCNPPGQGTQVTVSS

SEQ ID NO: 1600 - protein, 121 aa, Synthetic construct
EVQLVESGGGLVKPGGSLRLSCAASGFTFSTYSMNWVRQAPGKGLEWVSSISSSSGYIYYADSVKGRFTISRDNAKNSLYLQMNSLRAEDTAVYYCARDGTFSYYYYMDVWGKGTTVTVSS

SEQ ID NO: 1601 - protein, 123 aa, Synthetic construct
EVQLLESGGGLVQPGGSLRLSCAASGFTFSTYDMNWVRQAPGKGLEWVSVIVPSGGLTSYADSVKGRFTISRDNSKNTLYLQMNSLRAEDTAVYYCARGGGYSSSRSAGMDVWGQGTTVTVSS

SEQ ID NO: 1602 - protein, 117 aa, Synthetic construct
EVQLVETGGGLVQPGGSLRLSCAASGFTFSTYAMTWVRQAPGKGLEWVSAITPGGDRTYYADSVKGRFTISRDNSRNTLYLQMNSLRAEDTAVYYCARYYGYMIDMWGQGTLVTVSS

SEQ ID NO: 1603 - protein, 121 aa, Synthetic construct
EVQLVQSGGGVVQPGGSLRLSCAASGFTFSSYAMNWVRQAPGKGLEWVSYISSIETIYYADSVKGRFTISRDNAKNSLYLQMNSLRDEDTAVYYCARDRLVDVPLSSPNSWGQGTLVTVSS

SEQ ID NO: 1604 - protein, 119 aa, Synthetic construct
QITLKESGGGLIKPGGSLRLSCATSGFPFSAYAMNWVRQAPGRGLEWVSSITKNSDSLYYADSVKGRFTISRDNAGNSLYLQMNSLRVEDTAVYYCATLAARIMATDYWGQGTLVTVSS

SEQ ID NO: 1605 - protein, 121 aa, Synthetic construct
EVQLLESGGGLVQPGGSLRLSCAASRFTFSTYAMSWVRQAPGKGLEWVSGISGSGVSTHYADSVKGRFTISRDNSKNTLYLQMNSLRAEDTAVYYCAKSLIVVIVYALDHWGQGTLVTVSS

SEQ ID NO: 1606 - protein, 121 aa, Synthetic construct
EVQLLESGGGLVQPGGYLRLSCAASGFTFSTYAMSWVRQAPGKGLEWVSAISGSGVSTYYADSVKGRFTISRDNSKNTLYLQMNSLRAEDTAVYYCAKSLIVVMVYVLDYWGQGTLVTVSS

SEQ ID NO: 1607 - protein, 121 aa, Synthetic construct
EVQLLESGGGLVQPGGYLRLSCAASGFTFSTYAMSWVRQAPGKGLEWVSAISGSGVSTNYADSVKGRFTISRDNSKNTLYLQMNSLRAEDTAVYYCAKSLIVVMVYVLDYWGQGTLVTVSS

SEQ ID NO: 1608 - protein, 121 aa, Synthetic construct
EVQLLESGGGLVQPGGSLRLSCAASRFTFSTYAMSWVRQAPGKGLEWVSGISGSGVSTYYADSVKGRFTISRDNSKNTLYLQMNSLRAEDTAVYYCAKSLIVVIVYALDYWGQGTLVTVSS

SEQ ID NO: 1609 - protein, 120 aa, Synthetic construct
QVQLVQSGSELKKPGASVKVSCKASGYTFTNYAMNWVRQAPGQGLEWMGWINTYSGVGTYAGDFKGRFVFSLDTSVSTAYLQISSLKAEDTAVYYCARRGFYGRRFFDVWGKGTTVTVSS

SEQ ID NO: 1610 - protein, 138 aa, Synthetic construct
VHAFSVCDDPEYFYDYVQGLIDGLQSGLDSHDIVSIQNAKGLGYAMNTAEELKFVKDIATATGIVLDPVYSGKGAYAMLKDMADNPSKWKGRKVLFVHTGGLLGLYDKVDQMSSLAGSWRRMDLEESVPRKDGTGKMF

SEQ ID NO: 1611 - protein, 117 aa, Synthetic construct
QVQLQQSGAELVRPGVSVKISCKGSGYTFTDYAMNWVKQSHAKSLEWIGVISTYYGDANYNQKFKGKATMTVDKSSSTAYMELARLTSEDSAIYYCALIYYDYDGSYWGQGTTLTVS

SEQ ID NO: 1612 - protein, 117 aa, Synthetic construct
EVMLVESGGGLVKPGGSLKLSCAASGFIFSSYLISWVRQTPEKRLEWVAAISGGGADTYYADSVKGRFTISRDNAKNTLYLQMSSLRSEDTALYYCTRRGTYAMDYWGQGTSVTVSS

SEQ ID NO: 1613 - protein, 117 aa, Synthetic construct
EVQLVESGGGLVRPGGSLRLSCAASGFTFSSYLISWVRQAPGKGLEWVAAISGGGADTYYADSVKGRFTISRDNAKNSLYLQMNSLRAEDTATYYCARRGTYAMDYWGQGTLVTVSS

SEQ ID NO: 1614 - protein, 124 aa, Synthetic construct
EVQLVESGGGLVQPGGSLRLSCAASGFTFSSYAMNWVRQAPGKGLEWVSAISGNGGSTYYADSVKGRFTISRDNSKNTLYLQMNSLRAEDTAVYYCARGIYYIDGHGYFAFDAWGQGTVVTVSS

SEQ ID NO: 1615 - protein, 127 aa, Synthetic construct
QVQLVESGGGLVQPGGSLRLSCATSRFTFSNYAMNWVRQAPGKGLEWVSAISGSGGTTYYADSVKGRFTISRDNSRNSLYLQMNSLRGEDTAVYYCVKESVGALLWEIDDWQFFDYWGQGTLVTVSS

SEQ ID NO: 1616 - protein, 126 aa, Synthetic construct
QVQLVESGGCVVQPGRSLRLSCAASGFTFSTYAMYWVRQAPGEGLEWVAVISYHGSNKYYADSVKGRFTISRDNSKNTLYLLMNSLRAEDTAVYYCARDPGWSGSIMDYYYGMDVWGQGTTVIVSP

SEQ ID NO: 1617 - protein, 118 aa, Synthetic construct
QSVEESGGRLVTPGTPLTLTCTVSGFSLNTYYMNWVRQAPGKGLEWIGIIAPDDTTYYASWAKSRSTITRDTNENTVTLKMTSLTTEDTATYFCARSGDTTAWGADIWGPGTLVTVSL

SEQ ID NO: 1618 - protein, 119 aa, Synthetic construct
EVQLVESGGGLVQPGGSLRLSCAASGFSLNTYYMNWVRQAPGKGLEWVSIIAPDDTTYYASWAKSRFTISRDNSKNTLYLQMNSLRAEDTAVYYCAKSGDTTAWGADIWGQGTLVTVSS

SEQ ID NO: 1619 - protein, 119 aa, Synthetic construct
EVQLVESGGGSVQPGGSLRLSCTVSGFSLNTYYMNWVRQAPGKGLEWVGIIAPDDTTYYASWAKSRSTISRDTSKNTVYLQMNSLRAEDTATYYCARSGDTTAWGADIWGQGTTVTVSS

SEQ ID NO: 1620 - protein, 116 aa, Synthetic construct
EVQLVESGGGLIQPGGSLRLSCAASGFTFSNYAMNWVRQAPGKGLEWVSTINGRGSSTIYADSVKGRFTISRDNSKNTLYLQMNSLRAEDTATYYCARYISRGLGDSWGQGTLVTV

SEQ ID NO: 1621 - protein, 121 aa, Synthetic construct
EVQLLESGGGLVQPGGSLRLSCAASGFTFSTYAMFWVRQAPGKGLEWVASISSGGRYTYYPDSVKGRFTISRDNSKNTLYLQMNSLRAEDTAVYYCVRHSYGSSYWYLDVWGQGTLVTVSS

SEQ ID NO: 1622 - protein, 121 aa, Synthetic construct
EVQLVESGGGLVQPGGSLRLSCAASGFTFSTYAMFWVRQAPGKGLEWVASISSGGRYTYYPDSVKGRFTISRDNAKNSLYLQMNSLRAEDTAVYYCVRHSYGSSYWYLDVWGQGTLVTVSS

SEQ ID NO: 1623 - protein, 121 aa, Synthetic construct
QVQLVESGGGVVQPGRSLRLSCAASGFTFSTYAMFWVRQAPGKGLEWVASISSGGRYTYYPDSVKGRFTISRDNSKNTLYLQMNSLRAEDTAVYYCVRHSYGSSYWYLDVWGQGTLVTVSS

SEQ ID NO: 1624 - protein, 121 aa, Synthetic construct
QVQLVQSGAEVKKPGASVKVSCKASGFTFSTYAMFWVRQAPGQGLEWVASISSGGRYTYYPQKFQGRVTMTRDTSTSTVYMELSSLRSEDTAVYYCVRHSYGSSYWYLDVWGQGTLVTVSS

SEQ ID NO: 1625 - protein, 121 aa, Synthetic construct
QVQLVQSGAEVKKPGSSVKVSCKASGFTFSTYAMFWVRQAPGQGLEWVASISSGGRYTYYPQKFQGRVTITADESTSTAYMELSSLRSEDTAVYYCVRHSYGSSYWYLDVWGQGTLVTVSS

SEQ ID NO: 1626 - protein, 121 aa, Synthetic construct
EVQLVQSGAEVKKPGESLKISCKGSGFTFSTYAMFWVRQMPGKGLEWVASISSGGRYTYYPPSFQGQVTISADKSISTAYLQWSSLKASDTAMYYCVRHSYGSSYWYLDVWGQGTLVTVSS

SEQ ID NO: 1627 - protein, 121 aa, Synthetic construct
QVQLQESGPGLVKPSETLSLTCTVSGFTFSTYAMFWIRQPPGKGLEWVASISSGGRYTYYPPSLKSRVTISVDTSKNQFSLKLSSVTAADTAVYYCVRHSYGSSYWYLDVWGQGTLVTVSS

SEQ ID NO: 1628 - protein, 121 aa, Synthetic construct
EVQLVESGGGLVKPGGSLRLSCAASGFTFSTYAMFWVRQAPGKGLEWVASISSGGRYTYYPAPVKGRFTISRDDSKNTLYLQMNSLKTEDTAVYYCVRHSYGSSYWYLDVWGQGTLVTVSS

SEQ ID NO: 1629 - protein, 121 aa, Synthetic construct
QLQLQESGPGLVKPSETLSLTCTVSGFTFSTYAMFWIRQPPGKGLEWVASISSGGRYTYYPPSLKSRVTISVDTSKNQFSLKLSSVTAADTAVYYCVRHSYGSSYWYLDVWGQGTLVTVSS

SEQ ID NO: 1630 - protein, 121 aa, Synthetic construct
EVKLVEFGGALVKPGGSLKLSCAALGFTFSTYAMFRVRQTPEKREEGVASISSGGRYTYYPDSAKDRHPIFRDNARNTLYLQMSSLRSKDTAMYYCVRHSYGSSYWYLDVWGAGTTVTVSS

SEQ ID NO: 1631 - protein, 124 aa, Synthetic construct
EMQLLESGGGLVQPGGSLRLSCAASGFTFSSYAMNWVRQAPGEGLEWVSAITISGITAYYTDSVKGRFTISRDNSKNTLYLQMNSLRAGDTAVYYCAKEEFLPGTHYYYGMDVWGQGTTVTVSS

SEQ ID NO: 1632 - protein, 119 aa, Synthetic construct
EVQLLESGPGLVKPSETLSLTCNVAGGSISPYYWTWIRQPPGKCLELIGYIHSSGYTDYNPSLKSRVTISGDTSKKQFSLHVSSVTAADTAVYFCARADWDLLHALDIWGQGTLVTVSS

SEQ ID NO: 1633 - protein, 124 aa, Synthetic construct
EVQLLESGGGLVQPGGSLRLSCAASGFTFSSYAMNWVRQAPGKGLEWVSAITISGITAYYTDSVKGRFTISRDNSKNTLYLQMNSLRAEDTAVYYCAKEEFLPGTHYYYGMDVWGQGTTVTVSS

SEQ ID NO: 1634 - protein, 121 aa, Synthetic construct
QVQLVQSGAEVKKPGASVKVSCKASGFSLSTYAMNWVRQAPGQGLEWMGIISDDGTTYYATWAKGRVTMTRDTSTSTVYMELSSLRSEDTAVYYCARDAGAGGVQDYLTLWGQGTLVTVSS

SEQ ID NO: 1635 - protein, 115 aa, Synthetic construct
QVQLVQSGGGLVQPGRSLRLSCAASGFTFDDYAMNWVRQAPGKGLEWVSLIYSDGSTYYADSVKGRFTISRDNSKKTLYLQMNNLRVEDTAVYYCATHGGDRSYWGQGTLVTVSS

SEQ ID NO: 1636 - protein, 127 aa, Synthetic construct
EVQLLESGGGLVQPGGSLRLSCAASGFTFSTYAMDWVRQAPGKGLEWVSGIVPSGGFTKYADSVKGRFTISRDNSKNTLYLQMNSLRAEDTAVYYCARVNVIAVAGTGYYYYGMDVWGQGTTVTVSS

SEQ ID NO: 1637 - protein, 119 aa, Synthetic construct
EVQLQQSGAELVRPGALVKLSCKASGFNIKDYYIHWVKQRPEQGLEWIGWIDPENGHTIYDPKFQGKASITADTSSNTAYLQLSSLTSEDTAVYYCARLTGTTYAMDYWGQGTSVTVSS

SEQ ID NO: 1638 - protein, 123 aa, Synthetic construct
QVTLKESGPGILQPSHTLSLTCSFSGFSLNTYAMGVSWIRQPSGKGLEWLASIWWNGNKYNNPSLKSRLTVSKDTSNNQAFLKVTSVDTADTATYYCAHSRIIRFTDYVMDAWGQGASVTVSS

SEQ ID NO: 1639 - protein, 123 aa, Synthetic construct
QITLKESGPTLVKPTQTLTLTCTFSGFSLNTYAMGVSWIRQPPGKALEWLASIWWNGNKYNNPSLKSRLTVTKDTSKNQVVLTMTNMDPVDTATYYCAHSRIIRFTDYVMDAWGQGTLVTVSS

SEQ ID NO: 1640 - protein, 123 aa, Synthetic construct
QVTLKESGPSLVKPTQTLTLTCTFSGFSLNTYAMGVSWIRQPPGKALEWLASIWWNGNKYNNPSLKSRLTITKDTSKNQVVLKVTNMDPADTATYYCAHSRIIRFTDYVMDAWGQGTTVTVSS

SEQ ID NO: 1641 - protein, 123 aa, Synthetic construct
QVTLKESGPALVKPTHTLTLTCTFSGFSLNTYAMGVSWIRQPPGKALEWLASIWWNGNKYNNPSLKSRLTISKDTSKNQVVLTMTNMDPEDTATFYCAHSRIIRFTDYVMDAWGRGTTVTVSS

SEQ ID NO: 1642 - protein, 123 aa, Synthetic construct
QITLKESGPTLVKPTQTLTLTCTFSGFSLNTYAMGVSWIRQPPGKALEWLASIWWNGNKYNNPSLKSRLTVTKDTSKNQVVLTMTNMDPVDTATYYCAHSRIIAFTDYVMDAWGQGTLVTVSS

SEQ ID NO: 1643 - protein, 123 aa, Synthetic construct
QITLKESGPTLVKPTQTLTLTCTFSGFSLNTYAMGVSWIRQPPGKALEWLASIWWNGNKYNNPSLKSRLTVTKDTSKNQVVLTMTNMDPVDTATYYCAHSRIIDFTDYVMDAWGQGTLVTVSS

SEQ ID NO: 1644 - protein, 123 aa, Synthetic construct
QITLKESGPTLVKPTQTLTLTCTFSGFSLNTYAMGVSWIRQPPGKALEWLASIWWNGNKYNNPSLKSRLTVTKDTSKNQVVLTMTNMDPVDTATYYCAHSRIIEFTDYVMDAWGQGTLVTVSS

SEQ ID NO: 1645 - protein, 121 aa, Synthetic construct
EVQLVESGGGLVQAGGSLRLSCAASGRTYAMAWFRQAPGKEREFVAAISIVTDYADSVKGRFNISRDNRENTVYLQMNSLKPEDTAVYYCAANTYYSGAYFPRGHEWYEYWGQGTQVTVSS

SEQ ID NO: 1646 - protein, 125 aa, Synthetic construct
QVQLQESGGGVVQPGKSLRLSCVTSTFTLGTYAMHWVRQAPGKGLQWVAVISYDGRYADYADSVKGRFNISRDNSKNTLYLQMHSLTTEDTALYYCAKAIKAFRPVPPSFHMDVWGIGTTVTVSS

SEQ ID NO: 1647 - protein, 123 aa, Synthetic construct
QVQLVQSGADVKKPGASVRVSCKASGYTISTYAMSWVRQAPGQGLEWMGWISGYNGNTNYAQEFQGRVTMTRDTSTNTAYMELRSLRSDDTAFYYCARVKLTTMVRGGPFDYWGQGTLVTVSS

SEQ ID NO: 1648 - protein, 124 aa, Synthetic construct
QVQVVQSGGGLVQPGRSLRLSCAGSGFTFSTYAMSWVRQAPGKGLELVSGISFGGDNTHQADSVKGRFTISRVDSKSTLYLQMNRMRTEDTVVYYCEKAIKGYSSRPVRAYEMWGLGTMVTVSS

SEQ ID NO: 1649 - protein, 120 aa, Synthetic construct
LESGGGLVQPGGSLRLSCAASGLPFNYYAMNWVRQAPGKGLEWVSGISANGLNTYYAESVKGRFTISRENSQNTLYLQMNSLGAEDTAVYYCAKVLVAATHYYYNGMDVWGQGTTVTVSS

SEQ ID NO: 1650 - protein, 121 aa, Synthetic construct
EVQLLESGGGLVQPGKSLRLSCAVSGFTFSTYGMNWVRQAPGKGLEWVSSISGTGRTTYHADSVQGRFTVSRDNSKNILYLQMNSLRADDTAVYFCTKERGDYYYGVFDYWGQGTLVTVSS

SEQ ID NO: 1651 - protein, 84 aa, Synthetic construct
MSVITKVAAAKNKIVVGAGLLMASAGAFAADDGTSTATSYATEAMNSLKTQATDLIDQTWPVVTSVAVAGLAIRLFKKFSSKAV

SEQ ID NO: 1652 - protein, 121 aa, Synthetic construct
EVQLVESGGDLVQPGGSLRLSCAASGFTFSSYAMNWVRQGPGKGLEWVSAISGRGDSTYYADSVKGRLTISRDNSKNTLYLQMNSLRAEDTAVYYCVKEGEQLVYWYFDLWGRGTLVTVSS

SEQ ID NO: 1653 - protein, 129 aa, Synthetic construct
QVQLVESGGGLVQPGGSLRLSCTVSGFTFNSYAMNWVRQAPGKGLEWVSGIRGSGENTYYAETVKGRFTISRDNSKNTLYLEMNSLRAEDTAVYYCARKWGRMTVFGVATDQLYYFDYWGQGTLVTVSS

SEQ ID NO: 1654 - protein, 123 aa, Synthetic construct
EVQLVESGGGLVQPGGSLRLSCAVSGFTFSSYAMNWVRQAPGKGLEWVSAISGSADSTYYADSVKGRFTISRDNSKNTLYLQMNSLRAEDTASYYCAKDHYTDSSGWYELDYWGQGTLVTVSS

SEQ ID NO: 1655 - protein, 98 aa, Synthetic construct
QVQLVQSGHEVKQPGASVKVSCKASGYSFTTYGMNWVPQAPGQGLEWMGWFNTYTGNPTYAQGFTGRFVFSMDTSASTAYLQISSLKAEDMAMYYCAR

SEQ ID NO: 1656 - protein, 112 aa, Synthetic construct
GAELVRPGTSVKVSCKAFGYAFSNYLIEWVQQRHGQGLEGIGVMIYPGSGDHKYNEKFKGKATLTADKSSSTAYMQLSSLTSDDSAVYFCARFDYDVTYAMAYWGQGTSATV

SEQ ID NO: 1657 - protein, 115 aa, Synthetic construct
VQLVESGGGLVQPGGSLRLSCAASGFTFRGYAMNWVRQAPGKGLEWVASISGSGSITQYADSAKGRFTITRDNSKSTLYAHVSSLRADDTAVYYCAKGDYVFDYWGQGTLVTVSS

SEQ ID NO: 1658 - protein, 121 aa, Synthetic construct
QVQLQQPGAELVRPGASVKLSCKASGYTFTTYWMNWVKQRPEQGLEWIGRIDPYDSETHYNQKFKDKAILTVDKSSSTAYMQLSSLTSEDSAVYYCARGPYYGTNPWFPYWGQGTLVTVSS

SEQ ID NO: 1659 - protein, 127 aa, Synthetic construct
EVQLVESGGGLVQPGGSLRLSCAASGFTFSNYAMNWVRQAPGKGLEWVSTISGSGGATRYADSVKGRFTISRDNSRNTVYLQMNSLRVEDTAVFYCTKDRLIMATVRGPYYYGMDVWGQGTTVTVSS

SEQ ID NO: 1660 - protein, 126 aa, Synthetic construct
EVQLLESGGGSVQPGGSLRLSCAASGFTFSSYAMNWVRQAPGKGLEWVSAISGSGGSTHYADSVKGRFTISRDNSKNTLYLQMNSLRAEDTAVYYCGRAKFMQLWGGGLRYPLGYWGQGTMVTVSS

SEQ ID NO: 1661 - protein, 126 aa, Synthetic construct
EVQLLESGGGLVQPGGSLRLSCAASGFTFSSYAMNWVRQAPGKGLEWVSAISGSGGSTHYADSVKGRFTISRDNSKNTLYLQMNSLRAEDTAVYYCGRAKFMQLWGGGLRYPLGYWGQGTMVTVSS

SEQ ID NO: 1662 - protein, 147 aa, Synthetic construct
MKLKNPDKHQSLSSNAKVDKIATDSLKNETDIELKNMNNEDYLRMSEHESIDPFVSASTIQTGIGIAGKILGTLGVPFAGQIASLYSFILGELWPKGKSQWEIFMEHVEEIINQKILTYARNKALSDLRGLGDALAVYHESLESWVE

SEQ ID NO: 1663 - protein, 91 aa, Synthetic construct
QVQLVQSGSELKKPGASVKVSCKASGYTFTSYAMNWVRQAPGQGLEWMGWINTNTGNPTYAQGFTGRFVFSLDTSVSTAYLQISTLKAEDT

SEQ ID NO: 1664 - protein, 98 aa, Synthetic construct
QVQLVQSGSELKKPGASVKVSCKASGYTFTSYAMNWVRQAPGQGLEWMGWINTNTGNPTYAQGFTGRFVFSLDTSVSMAYLQISSLKAEDTAVYYCAR

SEQ ID NO: 1665 - protein, 98 aa, Synthetic construct
QVQLVQSGSELKKPGASVKVSCKASGYTFTSYAMNWVRQAPGQGLEWMGWINTNTGNPTYAQGFTGRFVFSLDTSVSMAYLQISSLKAEDTAVCYCAR

SEQ ID NO: 1666 - protein, 116 aa, Synthetic construct
EVQLLESGGGLVQPGGSLRLSCAASGFTFSTYAMGWVRQAPGKGLEWVSSIGSSGAQTRYADSVKGRFTISRDNSKNTLYLQMNSLRAEDTAVYYCARLAIGDSYWGQGTMVTVSS

SEQ ID NO: 1667 - protein, 116 aa, Synthetic construct
EVQLLESGGGLVQPGGSLRLSCAASGFTFSTYAMGWVRQAPGKGLEWVSSIGASGGQTRYADSVKGRFTISRDNSKNTLYLQMNSLRAEDTAVYYCARLAIGDSYWGQGTMVTVSS

SEQ ID NO: 1668 - protein, 116 aa, Synthetic construct
EVQLLESGGGLVQPGGSLRLSCAASGFTFSTYAMGWVRQAPGKGLEWVSSIGASGSQTRYADSVKGRFTISRDNSKNTLYLQMNSLRAEDTAVYYCARLAIGDSYWGQGTMVTVSS

SEQ ID NO: 1669 - protein, 52 aa, Synthetic construct
MDVVANRAIANRAIASGGRTRSREARWTSTTTETLVCVPSMGDSITEGTVSA

SEQ ID NO: 1670 - protein, 141 aa, Synthetic construct
MSEIRLGLVVTEFNREITYAMEELAVQHAKDLGAKVVERVLVPGSFEVPLAVRKLLERDDIDAVVTLGAIIKGDTDHDQAIAQQAFRKIQDLMVEYGKPVALGISGPGMTRMEALERVHYAKRAVEAAVKMVRRLRELEGE

SEQ ID NO: 1671 - protein, 91 aa, Synthetic construct
  VARIANT 13: note = X can be any amino acid
  VARIANT 14: note = X can be any amino acid
  VARIANT 20: note = X can be any amino acid
IYGSLQVHAFSVXXDPDYFXNFAQGLLDGLKAGVSSRDIVHIQNAKGLGYAMNTSEELNFVKEVAATIFVVLDPVYRYLFVPYIVYSLSAL

SEQ ID NO: 1672 - protein, 125 aa, Synthetic construct
MQVTPVHALGRGISPMQGLVMEVILTFSLLFVTYAMILDPRSQVRAIGPLLTGLIVGANSLAGGNFTGASMNPARSFGPALATGDWTNHWVYWIGPLLGGPLAGFVYESLFLVQKMHEPLLNGEV

SEQ ID NO: 1673 - protein, 113 aa, Synthetic construct
AGVSSRDIVHIQNAKGLGYAMNTSEELNFVKEVAATTGVVLDPVYSGKAAYAMLKDMSENPKKWERRKILFIHTGGLLGLYDKVDQLASFVGNWQRMDVNESVPRQDGIGKMF

SEQ ID NO: 1674 - protein, 132 aa, Synthetic construct
IKYELDKETGLLKIDRPQKFSSVCPTLYGFVPRTYAGNLSAAHCMEKTGLKGIKGDGDPIDICVLTEKMIPRGDIMLRAIPIGGFRMIDGNEADDKLISVLVDDFVYGGMKDLSDCPPALIERLRHYFHTYK

SEQ ID NO: 1675 - protein, 130 aa, Synthetic construct
LFQKQLPKMPREYITRLVLDKNHISMAIVKKGWRVVGGICYRPFESRGFAEIVFCAVDSSEQIKGYGSHLMNSLKDHVRKAHPTINHFLTYADNYAVGYFKKQGFTKQISLPRERWVGYIKDYEGGTIMQ

SEQ ID NO: 1676 - protein, 94 aa, Synthetic construct
MITATDFYHVMTAMVPLYVAMILAYGSVKWWKIFTPDQCSGINRFVALFAVPLLSFHFIDANNPYAMNLRFLAADSLHKIIVLCLLVLWCKISR

SEQ ID NO: 1677 - protein, 124 aa, Synthetic construct
EVQLVESGGGLVQPGGSLRLSCAASGFTFSTYAMNWVRQAPGKGLEWVSGISDRGGSRYYAGSVKGRFTISRDNSKNTLFLQMNSLRAEDTAVYYCARDIAPPYNYYFYGMDVWGRGTTVTVSS

SEQ ID NO: 1678 - protein, 127 aa, Synthetic construct
EVQLVETGGGVVQPGRSLRLSCSVSGFSFTTYAMHWVRQAPGKGLEWVAIISDDATKKYYADSVKGRFTISRDNSRNTLILQMNSLRAEDTGVYYCAKDGDPGYDSRYYYYYGMDVWGQGTTVTVSS

SEQ ID NO: 1679 - protein, 125 aa, Synthetic construct
EVQLVESGGGLVKPGGSLRLSCSASGFTFNIYAMNWVRQVPGKGLDWVSSISSRGDYIYYAESVEGRFTISRDNAKNSLYLEMNSLRAEDTAVYYCARAGLGTVDLRWGGAFDHWGKGILVTVSS

SEQ ID NO: 1680 - protein, 85 aa, Synthetic construct
YDVEGSRTKELPNSQFQNNEFGSSRTMNLSGQELPNSQSNDTDLSNTDYIETENNDTYDMNDTYNNSISHNHSGHTNHQQTEFNN

SEQ ID NO: 1681 - protein, 84 aa, Synthetic construct
ISAAIDKVSAERARMGAYQNRLEHSRNNVVTYAENLTAAESRIRDVDMAKEMMELMKNQIFTQAGQAMLLQTNTQPQAILQLLK

SEQ ID NO: 1682 - protein, 99 aa, Synthetic construct
DYSFRIKNRKTQECLITNLHSDTSVLLMGDCNHSIWTYDNETLVLNATGKCMYAMNSQDPRMFDCSKPDETINHHIHFKIVDNKYICLKNSVDPEICLN

SEQ ID NO: 1683 - protein, 126 aa, Synthetic construct
EVQLVESGGGLVQPGGSLRLSCAASGFTFSTYSMNWVRQAPGKGLEWVSYISSSSAIIYYADSVKGRFTISRDNAKNSLYLQMNSLRDEDTAVYYCARDLPITMIVVVMPDAFDIWGQGTMVTVSS

SEQ ID NO: 1684 - protein, 118 aa, Synthetic construct
QVQLQQSGGGLVKPGGSLTLSCAASRFTFSTYAMSWVRQTPAKRLEWVAYISSGGASTYYRDSVKGRFTISRDNAKNTLYLQMSSLRSEDTAMYYCARGGSRYAMDYWGQGTTVTVSS

SEQ ID NO: 1685 - protein, 139 aa, Synthetic construct
MALPVTALLLPLALLLHAARPQVQLQQSGGGLVKPGGSLTLSCAASRFTFSTYAMSWVRQTPAKRLEWVAYISSGGASTYYRDSVKGRFTISRDNAKNTLYLQMSSLRSEDTAMYYCARGGSRYAMDYWGQGTTVTVSS

SEQ ID NO: 1686 - protein, 120 aa, Synthetic construct
EVQLVESGGGLVQPGGSLRLSCAASGFTFSSYAMNWVRQAPGKGLEWVSAISWSGGNTYYADSVKGRFTISRDNSKNTLYLQMNSLRAEDTAVYYCARDLYAGYWGFDVWGQGTLVTVSS

SEQ ID NO: 1687 - protein, 120 aa, Synthetic construct
EVQLVESGGGLVQPGGSLRLSCAASGFTFSSYAMNWVRQAPGKGLEWVSAISYSGGSTYYADSVKGRFTISRDNSKNTLYLQMNSLRAEDTAVYYCARDLWLGWWGFDVWGQGTLVTVSS

SEQ ID NO: 1688 - protein, 123 aa, Synthetic construct
EVQLVESGGGLVQPGGSLRLSCAASGFTFSSYAMNWVRQAPGKGLEWVSAISGSGGSTYYADSVKGRFTISRDNSKNTLYLQMNSLRAEDTAVYYCARDLGWLSRLFAGFDVWGQGTLVTVSS

SEQ ID NO: 1689 - protein, 120 aa, Synthetic construct
EVQLVESGGGLVQPGGSLRLSCAASGFTFSSYAMNWVRQAPGKGLEWVSAISWSGGRTYYADSVKGRFTISRDNSKNTLYLQMNSLRAEDTAVYYCARDLYDGVWGFDVWGQGTLVTVSS

SEQ ID NO: 1690 - protein, 124 aa, Synthetic construct
VQLLESGGGLVQPGGSLRLSCTASGFTFSSYAMNWVRQAPGKGLEWVSAISGSGGTTFYADSVKGRFTISRDNSRTTLYLQMNSLRAEDTAVYYCAKDLGWSDSYYYYYGMDVWGQGTTVTVSS

SEQ ID NO: 1691 - protein, 118 aa, Synthetic construct
EVQLLESGGGLVQPGGSLRLSCAASGFTFDSYAMNWVRQAPGKGLEWVASINSNTGSIYYADSVKGRFTISRDNSKNTLYLQMNSLRAEDTAVYYCAREPYGVWMDYWGQGTLVTVSS

SEQ ID NO: 1692 - protein, 118 aa, Synthetic construct
EVQLLESGGGLVQPGGSLRLSCAASGFTFSSYAMNWVRQAPGKGLEWVASIKSSTGTISYADSVKGRFTISRDNSKNTLYLQMNSLRAEDTAVYYCAREPYSVWIDYWGQGTLVTVSS

SEQ ID NO: 1693 - protein, 118 aa, Synthetic construct
EVQLLESGGGLVQPGGSLRLSCAASGFTFSSYAMNWVRQAPGKGLEWVAYIKSDTGSIGYADSVKGRFTISRDNSKNTLYLQMNSLRAEDTAVYYCAREPYSVWIDYWGQGTLVTVSS

SEQ ID NO: 1694 - protein, 118 aa, Synthetic construct
EVQLLESGGGLVQPGGSLRLSCAASGFTFSSYAMNWVRQAPGKGLEWVAAISSSAGTSSYADSVKGRFTISRDNSKNTLYLQMNSLRAEDTAVYYCAREPYSVWMDYWGQGTLVTVSS

SEQ ID NO: 1695 - protein, 118 aa, Synthetic construct
EVQLLESGGGLVQPGGSLRLSCAASGFTFDSYAMNWVRQAPGKGLEWVASIKSNAGYSSYADSVKGRFTISRDNSKNTLYLQMNSLRAEDTAVYYCAREPYSYWMDYWGQGTLVTVSS

SEQ ID NO: 1696 - protein, 118 aa, Synthetic construct
EVQLLESGGGLVQPGGSLRLSCAASGFTFSSYAMNWVRQAPGKGLEWVASIKSNTGTTGYADSVKGRFTISRDNSKNTLYLQMNSLRAEDTAVYYCAREPYSYWMDYWGQGTLVTVSS

SEQ ID NO: 1697 - protein, 118 aa, Synthetic construct
EVQLLESGGGLVQPGGSLRLSCAASGFTFSSYAMNWVRQAPGKGLEWVSSISGNAGSIYYADSVKGRFTISRDNSKNTLYLQMNSLRAEDTAVYYCAREPYSYWMDYWGQGTLVTVSS

SEQ ID NO: 1698 - protein, 118 aa, Synthetic construct
EVQLLESGGGLVQPGGSLRLSCAASGFTFSSYAMNWVRQAPGKGLEWVAAISGNAGSSSYADSVKGRFTISRDNSKNTLYLQMNSLRAEDTAVYYCARVPYGVWLDYWGQGTLVTVSS

SEQ ID NO: 1699 - protein, 118 aa, Synthetic construct
EVQLLESGGGLVQPGGSLRLSCAASGFTFSSYAMNWVRQAPGKGLEWVASISSNTGTIGYADSVKGRFTISRDNSKNTLYLQMNSLRAEDTAVYYCARVPYSVWLDYWGQGTLVTVSS

SEQ ID NO: 1700 - protein, 121 aa, Synthetic construct
HVQLQQSGPELVRPGASVKLSCKASGYIFITYWMNWVKQRPGQGLEWIGQIFPASGSTNYNEMFEGKATLTVDTSSSTAYMQLSSLTSEDSAVYYCARGDGNYALDAMDYWGQGTSVTVSS

SEQ ID NO: 1701 - protein, 120 aa, Synthetic construct
EVQLVESGGGLVQPGGSLRLSCAASGFTFSTYAMHWVRQAPGKGLQHVSTISTNGVNTYYADSVKGRFTISRDNSKSTLYLQMGSLRAEDMAVYYCARDKDFWSGYFDYWGQGTLVTVSS

SEQ ID NO: 1702 - protein, 115 aa, Synthetic construct
QVQLVESGGGVVQPGRSLRLSCAVSGFTSSTYGMNWVRQAPGKGLEWVAVISYDGSNKYYADSVKGRFTISRDNSKNTLYLQMNSLRPEDTAVYYCARGRYFDLWGRGTLVTVSS

SEQ ID NO: 1703 - protein, 115 aa, Synthetic construct
QVQLVESGGGVVQPGRSLRLSCAVSGFTSSTYGMNWVRQAPGKGLEWVAVISFDGSNKYYADSVKGRFTISRDNSKNTLYLQMSSLRPEDTAVYYCARGRYFDLWGRGTLVTVSS

SEQ ID NO: 1704 - protein, 135 aa, Synthetic construct
MDWTWRILFLAVAATGAHSQVQLVQSGSELKKPGASVKVSCKASGYTFTSYAMNWVRQAPGQGLEWMGWINTNTGNPTYAQGFTGRFVFSLDTSVSTAYLQIQSLKAEDTAVYYCARANWYFDLWGRGTLVTVSS

SEQ ID NO: 1705 - protein, 121 aa, Synthetic construct
EVQLVESGGGLVQPGGSLRLSCAASGFSFSSYAMNWVRQAPGKGLEWVSTISDSGGSTYYADSVKGRFTISRDNSKNTLSLQMNSLRAEDTAVYYCAKDQGGSYPYYFHYWGQGTLVTVSS

SEQ ID NO: 1706 - protein, 121 aa, Synthetic construct
EVKLEESGGGLVQPGGSMKLSCAASGFTFSDAWMDWVRQSPEKGLEWVAEIRTYANNHATYYAESVKGRFTISRDDSKSSVYLQMNSLRAEDTGIYYCTRLANWDWYFDVWGAGTTVTVSS

SEQ ID NO: 1707 - protein, 117 aa, Synthetic construct
QIQLVQSGSELKKPGASVKVSCKASGYTFTHYAMNWVRQAPGQGLEWMGWINTYTGEPTYADGFTGRFVFSLDTSVSTAYLQISSLKAEDTAVYFCARDYYGSSPYWGQGTLVTVSS

SEQ ID NO: 1708 - protein, 142 aa, Synthetic construct
MNDVKSIEFNDESLRQLVRAGALESNQNLANNIKEYLLFSDLSSLDSTTASVRSAFQRIFGSNPDGIALNTETAFKAVKPPITQQYNRYCYKTIPYINYTRGGVTSRDIVLSSTYAYNYNSYPIEVSVSLSGTWEESQTVSS

SEQ ID NO: 1709 - protein, 142 aa, Synthetic construct
MNDVKSIEFNDESLRQLVRAGALESNQNLANNIKEYLLFSDLSSLDSSTASVRSAFQRIFGSNPDGIALNTETAFKAVKPPITQQYNRYCYKTIPYINYTRGGVTSRDIVLSSTYAYNYNSYPIEVSVSLSGTWEESQTVSS

SEQ ID NO: 1710 - protein, 132 aa, Synthetic construct
EVQLEQSGAELVRPGSSVKISCKASGYVFSTYWMNWVKQRPGQGLEWIGQIYPGDGGVNYNGEFKARATLTADRSSSTAYMQLRSLTSEDSAVYFCASSSYYGGSSVSWLAYWGQGTLVSVSAAKTTPPSVY

SEQ ID NO: 1711 - protein, 120 aa, Synthetic construct
EVKLQESGAELVRPGASVKLSCKASGYTFTTYWMNWVKQRPEQGLEWIGRIDPYDSDTHYNQKFSDKAILTVDKSSSTAYMQLNSLTSEDSAVYYCSRGDYVPIYAMDYWGQGTSVTVSS

SEQ ID NO: 1712 - protein, 120 aa, Synthetic construct
EVKLEESGAELVRPGASVKLSCKASGYTFTTYWMNWVKQRPEQGLEWIGRIDPYDSDTHYNQKFSDKAILTVDKSSSTAYMQLNSLTSEDSAVYYCSRGDYVPIYAMDYWGQGTSVTVSS

SEQ ID NO: 1713 - protein, 119 aa, Synthetic construct
EVQLVESGGGLVQPGGSLRLSCAASGFTFSTYAMSWVRQAPGMGLEWVSTISGFGGTTYYADSVKGRFTISRDNSKNSLYLQMNSLRAEDTAVYYCTKDENWESHFDYWGQGTLVTVSS

SEQ ID NO: 1714 - protein, 119 aa, Synthetic construct
EVQLVESGGGLVQPGGSLRLSCAASGFTFNTYAMTWVRQAPGKGLEWVSEISGYGGTTYYADSVKGRFTISRDNSKNTLYLQMNSLRAEDTAVYYCAKDENWNSHFDYWGQGTLVTVSS

SEQ ID NO: 1715 - protein, 111 aa, Synthetic construct
DIVLTQSPVSLVISLGQRATISCRASKSVSPSSYNFMHWYQQRPGQPPKLLITYASNLESGVPARFSGSGSGTDFTLNIHPVEEEDAATYYCQHSREFPFTFGGGTRLEIK

SEQ ID NO: 1716 - protein, 107 aa, Synthetic construct
  VARIANT 3: note = X can be any amino acid
  VARIANT 7: note = X can be any amino acid
  VARIANT 25: note = X can be any amino acid
  VARIANT 27: note = X can be any amino acid
  VARIANT 30: note = X can be any amino acid
  VARIANT 35: note = X can be any amino acid
  VARIANT 54: note = X can be any amino acid
  VARIANT 55: note = X can be any amino acid
  VARIANT 56: note = X can be any amino acid
  VARIANT 57: note = X can be any amino acid
  VARIANT 59: note = X can be any amino acid
  VARIANT 60: note = X can be any amino acid
  VARIANT 61: note = X can be any amino acid
  VARIANT 63: note = X can be any amino acid
  VARIANT 65: note = X can be any amino acid
  VARIANT 66: note = X can be any amino acid
  VARIANT 68: note = X can be any amino acid
  VARIANT 69: note = X can be any amino acid
  VARIANT 70: note = X can be any amino acid
  VARIANT 74: note = X can be any amino acid
  VARIANT 75: note = X can be any amino acid
  VARIANT 78: note = X can be any amino acid
  VARIANT 86: note = X can be any amino acid
  VARIANT 102: note = X can be any amino acid
PGXSVKXSCKASGYSFTTYWMNWVXQXPGXGLEWXGMIHPSDSETSLNQAFKDXXXXTXXXSXSXXYXXXSSLXXEDXAVYYCARXGRRNPYYFDYWGQGTXVTVSS

SEQ ID NO: 1717 - protein, 120 aa, Synthetic construct
EVQLLQSGAVLARPGTSVKISCKASGYSFTTYWMNWVKQRPGQGLEWIGMIHPSDSETSLNQAFKDKAKLTAATSASIAYLEFSSLTNEDSAVYYCARMGRRNPYYFDYWGQGTLVTVSS

SEQ ID NO: 1718 - protein, 120 aa, Synthetic construct
EVQLVQSGAVLVKPGASVKVSCKASGYSFTTYWMNWVRQRPGKGLEWIGMIHPSDSETSLNQAFKDKVTITADESTSTAYMQLSSLRSEDTAVYYCARMGRRNPYYFDYWGQGTTVTVSS

SEQ ID NO: 1719 - protein, 120 aa, Synthetic construct
EVQLVQSGAVVAKPGSSVKVSCKASGYSFTTYWMNWVRQAPGQGLEWMGMIHPSDSETSLNQAFKDRVTITADKSTSTAYMELSSLTSEDTAVYYCARMGRRNPYYFDYWGQGTTVTVSS

SEQ ID NO: 1720 - protein, 120 aa, Synthetic construct
EVQLVQSGAEVKKPGASVKVSCKASGYSFTTYWMNWVRQAPGQGLEWMGMIHPSDSETSLNQAFKDRVTMTRDTSTSTVYMELSSLRSEDTAVYYCARMGRRNPYYFDYWGQGTLVTVSS

SEQ ID NO: 1721 - protein, 120 aa, Synthetic construct
EVQLLQAGAVLARPGTSVKISCKASGYSFTTYWMNWVKQRPGKGLEWIGMIHPSDSETSLNQAFKDKAKLTAATSASIAYLEFSSLTNEDSAVYYCARIGRRNPYYFDYWGQGTLVTVSS

SEQ ID NO: 1722 - protein, 120 aa, Synthetic construct
EVQLLESGPELVRPGSSVKISCKASGYSFTTYWMNWVKQRPGKGLEWIGMIHPSDSETSLNQAFKDKVKLTAATSASIAYLEFSSLRNEDSAVYYCARMGRRNPYYFDYWGQGTLVTVSS

SEQ ID NO: 1723 - protein, 120 aa, Synthetic construct
QVQLQQPGAVLVRPGVSVKLSCKASGYSFTTYWMNWVKQRPGQGLEWIGMIHPSDSETSLNQAFKDKATLTIDKSSSTAYMQLSSPTSEDSAVYFCARMGRRNPYYFDYWGQGTTLTVSS

SEQ ID NO: 1724 - protein, 129 aa, Synthetic construct
QVQLVQSGGGVVQPGRSLRLSCVASGFTFSTYAMHWVRQAPGRGLEWVAVISYDGNYKYYADSVKGRFSISRDNSNSTLHLEMNTLRTEDTALYYCAKDSQLRSLLYFEWLSQGYFDPWGQGTLVTVTS

SEQ ID NO: 1725 - protein, 129 aa, Synthetic construct
QVQLVQSGGGVVQPGRSLRLSCVASGFTFSTYAMHWVRQAPGRGLEWVAVISYDANYKYYADSVKGRFSISRDNSQNTLHLEMNTLRTEDTALYYCAKDSQLRSLLYFEWLSQGYFEPWGQGTLVTVTS

SEQ ID NO: 1726 - protein, 119 aa, Synthetic construct
EVQLVESGGGLVQPGGSLTLSCVASGSTYSMNAMGWYRRAPGKQRELVAGISSDGSQVYVDSVKGRFTISRDNAKNSVYLQMNSLRAEDTAVYYCYYFRTVAGSASGYWGQGTLVTVSS

SEQ ID NO: 1727 - protein, 121 aa, Synthetic construct
QVQLQESGGGLVQAGGSLRLSCAASGLTFDTYAMGWFRQAPGKKREYVAAISWTGISTYYADIAKGRFTISRDNAKNTLYLQMDSLKPEDTAVYYCAAQKSLNVPAPWDYWGQGTQVTVSS

SEQ ID NO: 1728 - protein, 121 aa, Synthetic construct
QVQLQESGGGLVQAGGSLRLSCAASGLTFDTYAMGWFRQAPGKKREYVAAISWTGISTYYADIAKGRFTISRDNAKNTLYLQMDSLKPEDTAVYYCAAQRSLNVPAPWDYWGQGTQVTVSS

SEQ ID NO: 1729 - protein, 117 aa, Synthetic construct
EVQLLESGGGLVQPGGSLRLSCAASGFTFSSYAMNWVRQAPGKGLEWVSTISYSGSLISYADSVKGRFTISRDNSKNTLYLQMNSLRAEDTAVYYCARINNDPMDVWGQGTLVTVSS

SEQ ID NO: 1730 - protein, 117 aa, Synthetic construct
EVQLLESGGGLVQPGGSLRLSCAASGFTFSSYAMNWVRQAPGKGLEWVSTISYHGSHISYHDSVHHRFTISRDNSKNTLYLQMNSLRAEDTAVYYCARIHHDPMDVWGQGTLVTVSS

SEQ ID NO: 1731 - protein, 117 aa, Synthetic construct
EVQLLESGGGLVQPGGSLRLSCAASGFTFSSYAMNWVRQAPGKGLEWVSTISYSGSLIHYADSVKGRFTISRDNSKNTLYLQMNSLRAEDTAVYYCARINNDPMDVWGQGTLVTVSS

SEQ ID NO: 1732 - protein, 117 aa, Synthetic construct
EVQLLESGGGLVQPGGSLRLSCAASGFTFSSYAMNWVRQAPGKGLEWVSTISYSGSLISYADSVKGRFTISRDNSKNTLYLQMNSLRAEDTAVYYCARINHDPMDVWGQGTLVTVSS

SEQ ID NO: 1733 - protein, 117 aa, Synthetic construct
EVQLLESGGGLVQPGGSLRLSCAASGFTFSSYAMNWVRQAPGKGLEWVSTISYSGSLISYADSVKGRFTISRDNSKNTLYLQMNSLRAEDTAVYYCARIHHDPMDVWGQGTLVTVSS

SEQ ID NO: 1734 - protein, 117 aa, Synthetic construct
EVQLLESGGGLVQPGGSLRLSCAASGFTFSSYAMNWVRQAPGKGLEWVSTISYSGSLISYADSVKGRFTISRDNSKNTLYLQMNSLRAEDTAVYYCARIHHDPMDHWGQGTLVTVSS

SEQ ID NO: 1735 - protein, 117 aa, Synthetic construct
EVQLLESGGGLVQPGGSLRLSCAASGFTFSSYAMNWVRQAPGKGLEWVSTISHSGHHISHHDSHHGRFTISRDNSKNTLYLQMNSLRAEDTAVYYCARINNDPMDVWGQGTLVTVSS

SEQ ID NO: 1736 - protein, 117 aa, Synthetic construct
EVQLLESGGGLVQPGGSLRLSCAASGFTFSSYAMNWVRQAPGKGLEWVSTISHSHSLISYAHSVHGRFTISRDNSKNTLYLQMNSLRAEDTAVYYCARINNDPMDVWGQGTLVTVSS

SEQ ID NO: 1737 - protein, 117 aa, Synthetic construct
EVQLLESGGGLVQPGGSLRLSCAASGFTFSSYAMNWVRQAPGKGLEWVSTIHHSGHLHSHADHVKGRFTISRDNSKNTLYLQMNSLRAEDTAVYYCARINNDPMDVWGQGTLVTVSS

SEQ ID NO: 1738 - protein, 117 aa, Synthetic construct
EVQLLESGGGLVQPGGSLRLSCAASGFTFSSYAMNWVRQAPGKGLEWVSTISHSGHLIHHADSHKGRFTISRDNSKNTLYLQMNSLRAEDTAVYYCARINNDPMDVWGQGTLVTVSS

SEQ ID NO: 1739 - protein, 117 aa, Synthetic construct
EVQLLESGGGLVQPGGSLRLSCAASGFTFSSYAMNWVRQAPGKGLEWVSTISYHGSHISYHHSHKGRFTISRDNSKNTLYLQMNSLRAEDTAVYYCARINNDPMDVWGQGTLVTVSS

SEQ ID NO: 1740 - protein, 117 aa, Synthetic construct
EVQLLESGGGLVQPGGSLRLSCAASGFTFSSYAMNWVRQAPGKGLEWVSTISYHGSHISYADHHKHRFTISRDNSKNTLYLQMNSLRAEDTAVYYCARINNDPMDVWGQGTLVTVSS

SEQ ID NO: 1741 - protein, 117 aa, Synthetic construct
EVQLLESGGGLVQPGGSLRLSCAASGFTFSSYAMNWVRQAPGKGLEWVSTISYSGHLIHYADHHHGRFTISRDNSKNTLYLQMNSLRAEDTAVYYCARINNDPMDVWGQGTLVTVSS

SEQ ID NO: 1742 - protein, 117 aa, Synthetic construct
EVQLLESGGGLVQPGGSLRLSCAASGFTFSSYAMNWVRQAPGKGLEWVSTISYHGSHISHADHVHGRFTISRDNSKNTLYLQMNSLRAEDTAVYYCARINNDPMDVWGQGTLVTVSS

SEQ ID NO: 1743 - protein, 117 aa, Synthetic construct
EVQLLESGGGLVQPGGSLRLSCAASGFTFSSYAMNWVRQAPGKGLEWVSTISYHGHHISHADHVKHRFTISRDNSKNTLYLQMNSLRAEDTAVYYCARINNDPMDVWGQGTLVTVSS

SEQ ID NO: 1744 - protein, 117 aa, Synthetic construct
EVQLLESGGGLVQPGGSLRLSCAASGFTFSSYAMNWVRQAPGKGLEWVSTISHSGHLIHHHHSVKGRFTISRDNSKNTLYLQMNSLRAEDTAVYYCARINNDPMDVWGQGTLVTVSS

SEQ ID NO: 1745 - protein, 117 aa, Synthetic construct
EVQLLESGGGLVQPGGSLRLSCAASGFTFSSYAMNWVRQAPGKGLEWVSTISYHGSHISYHDSHHGRFTISRDNSKNTLYLQMNSLRAEDTAVYYCARINNDPMDVWGQGTLVTVSS

SEQ ID NO: 1746 - protein, 117 aa, Synthetic construct
EVQLLESGGGLVQPGGSLRLSCAASGFTFSSYAMNWVRQAPGKGLEWVSTISYHHHLISHADSVKGRFTISRDNSKNTLYLQMNSLRAEDTAVYYCARINNDPMDVWGQGTLVTVSS

SEQ ID NO: 1747 - protein, 117 aa, Synthetic construct
EVQLLESGGGLVQPGGSLRLSCAASGFTFSSYAMNWVRQAPGKGLEWVSTISYHGHHISHADHHKGRFTISRDNSKNTLYLQMNSLRAEDTAVYYCARINNDPMDVWGQGTLVTVSS

SEQ ID NO: 1748 - protein, 117 aa, Synthetic construct
EVQLLESGGGLVQPGGSLRLSCAASGFTFSSYAMNWVRQAPGKGLEWVSTISYHGHHISYADSHHHRFTISRDNSKNTLYLQMNSLRAEDTAVYYCARINNDPMDVWGQGTLVTVSS

SEQ ID NO: 1749 - protein, 117 aa, Synthetic construct
EVQLLESGGGLVQPGGSLRLSCAASGFTFSSYAMNWVRQAPGKGLEWVSTIHHSGHLHSYHHHVKGRFTISRDNSKNTLYLQMNSLRAEDTAVYYCARINNDPMDVWGQGTLVTVSS

SEQ ID NO: 1750 - protein, 117 aa, Synthetic construct
EVQLLESGGGLVQPGGSLRLSCAASGFTFSSYAMNWVRQAPGKGLEWVSTISHSGHLHHYADSHKHRFTISRDNSKNTLYLQMNSLRAEDTAVYYCARINNDPMDVWGQGTLVTVSS

SEQ ID NO: 1751 - protein, 117 aa, Synthetic construct
EVQLLESGGGLVQPGGSLRLSCAASGFTFSSYAMNWVRQAPGKGLEWVSTISYHGSHISYHDSVHHRFTISRDNSKNTLYLQMNSLRAEDTAVYYCARINNDPMDVWGQGTLVTVSS

SEQ ID NO: 1752 - protein, 117 aa, Synthetic construct
EVQLLESGGGLVQPGGSLRLSCAASGFTFSSYAMNWVRQAPGKGLEWVSTISYHGHHISHAHHVHGRFTISRDNSKNTLYLQMNSLRAEDTAVYYCARINNDPMDVWGQGTLVTVSS

SEQ ID NO: 1753 - protein, 117 aa, Synthetic construct
EVQLLESGGGLVQPGGSLRLSCAASGFTFSSYAMNWVRQAPGKGLEWVSTISYSGSLISYADSVKGRFTISRDNSKNTLYLQMNSLRAEDTAVYYCARIHHHPHDHWGQGTLVTVSS

SEQ ID NO: 1754 - protein, 117 aa, Synthetic construct
EVQLLESGGGLVQPGGSLRLSCAASGFTFSSYAMNWVRQAPGKGLEWVSTISYSGSLISYADSVKGRFTISRDNSKNTLYLQMNSLRAEDTAVYYCARINHDPMDHWGQGTLVTVSS

SEQ ID NO: 1755 - protein, 117 aa, Synthetic construct
EVQLLESGGGLVQPGGSLRLSCAASGFTFSSYAMNWVRQAPGKGLEWVSTISYSGSLIHYADSVKGRFTISRDNSKNTLYLQMNSLRAEDTAVYYCARINHDPMDVWGQGTLVTVSS

SEQ ID NO: 1756 - protein, 117 aa, Synthetic construct
EVQLLESGGGLVQPGGSLRLSCAASGFTFSSYAMNWVRQAPGKGLEWVSTISHSGHHISHHDSHHGRFTISRDNSKNTLYLQMNSLRAEDTAVYYCARINHDPMDVWGQGTLVTVSS

SEQ ID NO: 1757 - protein, 117 aa, Synthetic construct
EVQLLESGGGLVQPGGSLRLSCAASGFTFSSYAMNWVRQAPGKGLEWVSTISHSGHLIHHADSHKGRFTISRDNSKNTLYLQMNSLRAEDTAVYYCARINHDPMDVWGQGTLVTVSS

SEQ ID NO: 1758 - protein, 117 aa, Synthetic construct
EVQLLESGGGLVQPGGSLRLSCAASGFTFSSYAMNWVRQAPGKGLEWVSTISYSGHLIHYADHHHGRFTISRDNSKNTLYLQMNSLRAEDTAVYYCARINHDPMDVWGQGTLVTVSS

SEQ ID NO: 1759 - protein, 117 aa, Synthetic construct
EVQLLESGGGLVQPGGSLRLSCAASGFTFSSYAMNWVRQAPGKGLEWVSTISYHGSHISHADHVHGRFTISRDNSKNTLYLQMNSLRAEDTAVYYCARINHDPMDVWGQGTLVTVSS

SEQ ID NO: 1760 - protein, 117 aa, Synthetic construct
EVQLLESGGGLVQPGGSLRLSCAASGFTFSSYAMNWVRQAPGKGLEWVSTISYHGSHISYHDSHHGRFTISRDNSKNTLYLQMNSLRAEDTAVYYCARINHDPMDVWGQGTLVTVSS

SEQ ID NO: 1761 - protein, 117 aa, Synthetic construct
EVQLLESGGGLVQPGGSLRLSCAASGFTFSSYAMNWVRQAPGKGLEWVSTISYHGHHISYADSHHHRFTISRDNSKNTLYLQMNSLRAEDTAVYYCARINHDPMDVWGQGTLVTVSS

SEQ ID NO: 1762 - protein, 117 aa, Synthetic construct
EVQLLESGGGLVQPGGSLRLSCAASGFTFSSYAMNWVRQAPGKGLEWVSTISYHGSHISYHDSVHHRFTISRDNSKNTLYLQMNSLRAEDTAVYYCARINHDPMDVWGQGTLVTVSS

SEQ ID NO: 1763 - protein, 117 aa, Synthetic construct
EVQLLESGGGLVQPGGSLRLSCAASGFTFSSYAMNWVRQAPGKGLEWVSTISYSGSLIHYADSVKGRFTISRDNSKNTLYLQMNSLRAEDTAVYYCARIHHDPMDVWGQGTLVTVSS

SEQ ID NO: 1764 - protein, 117 aa, Synthetic construct
EVQLLESGGGLVQPGGSLRLSCAASGFTFSSYAMNWVRQAPGKGLEWVSTISHSGHHISHHDSHHGRFTISRDNSKNTLYLQMNSLRAEDTAVYYCARIHHDPMDVWGQGTLVTVSS

SEQ ID NO: 1765 - protein, 117 aa, Synthetic construct
EVQLLESGGGLVQPGGSLRLSCAASGFTFSSYAMNWVRQAPGKGLEWVSTISYSGHLIHYADHHHGRFTISRDNSKNTLYLQMNSLRAEDTAVYYCARIHHDPMDVWGQGTLVTVSS

SEQ ID NO: 1766 - protein, 117 aa, Synthetic construct
EVQLLESGGGLVQPGGSLRLSCAASGFTFSSYAMNWVRQAPGKGLEWVSTISYHGSHISHADHVHGRFTISRDNSKNTLYLQMNSLRAEDTAVYYCARIHHDPMDVWGQGTLVTVSS

SEQ ID NO: 1767 - protein, 117 aa, Synthetic construct
EVQLLESGGGLVQPGGSLRLSCAASGFTFSSYAMNWVRQAPGKGLEWVSTISYHGSHISYHDSHHGRFTISRDNSKNTLYLQMNSLRAEDTAVYYCARIHHDPMDVWGQGTLVTVSS

SEQ ID NO: 1768 - protein, 117 aa, Synthetic construct
EVQLLESGGGLVQPGGSLRLSCAASGFTFSSYAMNWVRQAPGKGLEWVSTISYHGHHISYADSHHHRFTISRDNSKNTLYLQMNSLRAEDTAVYYCARIHHDPMDVWGQGTLVTVSS

SEQ ID NO: 1769 - protein, 117 aa, Synthetic construct
EVQLLESGGGLVQPGGSLRLSCAASGFTFSSYAMNWVRQAPGKGLEWVSTISYHGHHISYADSHHHRFTISRDNSKNTLYLQMNSLRAEDTAVYYCARIHHDPMDHWGQGTLVTVSS

SEQ ID NO: 1770 - protein, 117 aa, Synthetic construct
EVQLLESGGGLVQPGGSLRLSCAASGFTFSSYAMNWVRQAPGKGLEWVSTISYHGSHISYHDSVHHRFTISRDNSKNTLYLQMNSLRAEDTAVYYCARIHHDPMDHWGQGTLVTVSS

SEQ ID NO: 1771 - protein, 117 aa, Synthetic construct
EVQLLESGGGLVQPGGSLRLSCAASGFTFSSYAMNWVRQAPGKGLEWVSTISYSGSHISYHDSVHHRFTISRDNSKNTLYLQMNSLRAEDTAVYYCARIHHDPMDVWGQGTLVTVSS

SEQ ID NO: 1772 - protein, 117 aa, Synthetic construct
EVQLLESGGGLVQPGGSLRLSCAASGFTFSSYAMNWVRQAPGKGLEWVSTISYHGSLISYHDSVHHRFTISRDNSKNTLYLQMNSLRAEDTAVYYCARIHHDPMDVWGQGTLVTVSS

SEQ ID NO: 1773 - protein, 117 aa, Synthetic construct
EVQLLESGGGLVQPGGSLRLSCAASGFTFSSYAMNWVRQAPGKGLEWVSTISYHGSHISYADSVHHRFTISRDNSKNTLYLQMNSLRAEDTAVYYCARIHHDPMDVWGQGTLVTVSS

SEQ ID NO: 1774 - protein, 117 aa, Synthetic construct
EVQLLESGGGLVQPGGSLRLSCAASGFTFSSYAMNWVRQAPGKGLEWVSTISYHGSHISYHDSVKHRFTISRDNSKNTLYLQMNSLRAEDTAVYYCARIHHDPMDVWGQGTLVTVSS

SEQ ID NO: 1775 - protein, 117 aa, Synthetic construct
EVQLLESGGGLVQPGGSLRLSCAASGFTFSSYAMNWVRQAPGKGLEWVSTISYHGSHISYHDSVHGRFTISRDNSKNTLYLQMNSLRAEDTAVYYCARIHHDPMDVWGQGTLVTVSS

SEQ ID NO: 1776 - protein, 117 aa, Synthetic construct
EVQLLESGGGLVQPGGSLRLSCAASGFTFSSYAMNWVRQAPGKGLEWVSTISYHGSHISYHDSVHHRFTISRDNSKNTLYLQMNSLRAEDTAVYYCARIHNDPMDVWGQGTLVTVSS

SEQ ID NO: 1777 - protein, 117 aa, Synthetic construct
EVQLLESGGGLVQPGGSLRLSCAASGFTFSSYAMNWVRQAPGKGLEWVSTISYHGSLISYADSVKGRFTISRDNSKNTLYLQMNSLRAEDTAVYYCARIHHDPMDVWGQGTLVTVSS

SEQ ID NO: 1778 - protein, 117 aa, Synthetic construct
EVQLLESGGGLVQPGGSLRLSCAASGFTFSSYAMNWVRQAPGKGLEWVSTISYSGSHISYADSVKGRFTISRDNSKNTLYLQMNSLRAEDTAVYYCARIHHDPMDVWGQGTLVTVSS

SEQ ID NO: 1779 - protein, 117 aa, Synthetic construct
EVQLLESGGGLVQPGGSLRLSCAASGFTFSSYAMNWVRQAPGKGLEWVSTISYHGSHISYADSVKGRFTISRDNSKNTLYLQMNSLRAEDTAVYYCARIHHDPMDVWGQGTLVTVSS

SEQ ID NO: 1780 - protein, 141 aa, Synthetic construct
MALPVTALLLPLALLLHAARPQVQLQQPGAELVRPGASVKLSCKASGYSFTTYWMNWVKQRPGQGLEWIGMIHPSDSETRLNQKFKDKATLTVDKSSSTAYMQLSSPTSEDSAVYYCARSTMIATRAMDYWGQGTSVTVSS

SEQ ID NO: 1781 - protein, 131 aa, Synthetic construct
DDDDDDDDDDHVQLQQSGPELVRPGASVKLSCKASGYIFITYWMNWVKQRPGQGLEWIGQIFPASGSTNYNEMFEGKATLTVDTSSSTAYMQLSSLTSEDSAVYYCARGDGNYALDAMDYWGQGTSVTVSS

SEQ ID NO: 1782 - protein, 119 aa, Synthetic construct
QVQLVQSGSELKKPGSSVKVSCKASGYTFTNYAMNWVRQAPGQGLEWMGWITTNTGDPTYAQGFTGRFVFSLDTSVSTAYLQISSLKAEDTAVYYCVRVYNWIRGFDYWGQGTLVTVSS

SEQ ID NO: 1783 - protein, 108 aa, Synthetic construct
TFCRVFLYFLYAADHVSTYAMFVQTHRPTGEFMFEFDEDEMFYVDLDKKETVWHLEEFGQAFSFEAQGGLANIAILNNNLNTLIQRSNHTQATNGTPYLCLFLCSPTG

SEQ ID NO: 1784 - protein, 126 aa, Synthetic construct
QVQLVESGGGVVQPGRSLRLSCAASGFTFSTYAMHWVRQAPGKGLEWVAVIWYDGINKYYADSVKGRFTISRDNSKNTLYLQMNSLRAEDTAVYYCARGSYYDSSGYYYGEDFDYWGQGTLVTVSS

SEQ ID NO: 1785 - protein, 120 aa, Synthetic construct
EVQLLESGGGLVQPGGSLRLSCAASGFTFSTYAMSWVRQAPGKGLEWVSAISGSGGSTFYADSVKGRFTISRDNSKNTLSLQMNSLRAEDTAVYYCAKHDYSNYPYFDYWGQGTLVTVSS

SEQ ID NO: 1786 - protein, 120 aa, Synthetic construct
EVQLLESGGGLVQPGGSLRLSCAASGFTFSTYAMSWVRQAPGKGLEWVSLISGSGGRTYYADSVKGRFTISRDNSKNTLYLQMNSLRAEDTAVYYCAKHDYSNYPYFDYWGQGTLVTVSS

SEQ ID NO: 1787 - protein, 120 aa, Synthetic construct
EVQLLESGGGMVQPGGSLRLSCAASGFTFSTYAMSWVRQAPGKGLEWVSAISGSGGRTFYADSVEGRFTISRDNSKNTLYLQMNSLRAEDTAVYYCAKHDYSNYPYFDYWGQGTLVTVSS

SEQ ID NO: 1788 - protein, 120 aa, Synthetic construct
EVQLLESGGGLVQPGGSLRLSCAASGFTFSTYAMSWVRQAPGKGLEWVSAISGSGGGTFYADSVKGRFTISRDNSKNTLYLQMNSLRAEDTAVYYCAKHDYSNYPYFDYWGQGTLVTVSS

SEQ ID NO: 1789 - protein, 120 aa, Synthetic construct
EVQLLESGGGVVQPGRSLRLSCAASGFTFSTYAMSWVRQAPGKGLEWVSLISGSGGRTYYADSVKGRFTISRDNSKNTLYLQMNSLRAEDTAVYYCAKHDYSNYPYFDYWGQGTLVTVSS

SEQ ID NO: 1790 - protein, 120 aa, Synthetic construct
EVQLLESGGGLVQPGGSLRLSCAASGFTFSTYAMSWVRQAPGKGLEWVSTISDSGGSTFYADSVMGRFTISRDNSKNTLYLQMNSLRAEDTAVYYCARHDYSNYAFFDYWGQGTLVTVSS

SEQ ID NO: 1791 - protein, 120 aa, Synthetic construct
EVQLLESGGGLVQPGGSLRLSCAASGFTFSTYAMSWVRQAPGKGLDWVSAISGSGGYTYYADSVEGRFTISRDNSRNTLYLQMNSLRAEDTAVYYCASHDYSNYAWFDPWGQGTLVTVSS

SEQ ID NO: 1792 - protein, 120 aa, Synthetic construct
EVQLVESGGGLVKPGGSLRLSCAASGITFSTYTMNWVRQAPGKGLEWVSSISSSSGYIYYADSVKGRFTISRDNAKNSLYLQMNSLRAEDTAVYYCARGDYSNYLYFDLWGRGTLVTVSS

SEQ ID NO: 1793 - protein, 120 aa, Synthetic construct
EVQLLESGGGLVQPGGSLRLSCAASGFTFSTYAMSWVRQAPGKCLDWVSAISGSGGYTYYADSVEGRFTISRDNSRNTLYLQMNSLRAEDTAVYYCASHDYSNYAWFDPWGQGTLVTVSS

SEQ ID NO: 1794 - protein, 120 aa, Synthetic construct
EVQLLESGGGLVQPGGSLRLSCAASGFTFSTYAMSWVRQAPGKCLEWVSAISGSGGSTFYADSVKGRFTISRDNSKNTLSLQMNSLRAEDTAVYYCAKHDYSNYPYFDYWGQGTLVTVSS

SEQ ID NO: 1795 - protein, 119 aa, Synthetic construct
EVQLLESGGGMVQPGGSLRLSCAASGFTFSTYAMSWVRQAPGKCLEWVSAISGSGGRTFYADSVEGRFTISRDNSKNTLYLQMNSLRAEDTAVYYCAKHDYSNYPYFDYWGQGTLVTVS

SEQ ID NO: 1796 - protein, 120 aa, Synthetic construct
EVQLLESGGGMVQPGGSLRLSCAASGFTFSTYAMSWVRQAPGKCLEWVSAISGSGGRTFYADSVEGRFTISRDNSKNTLYLQMNSLRAEDTAVYYCAKHDYSNYPYFDYWGQGTLVTVSS

SEQ ID NO: 1797 - protein, 120 aa, Synthetic construct
EVQLLESGGGLVQPGGSLRLSCAASGFTFSTYAMSWVRQAPGKCLEWVSAISGSGGGTFYADSVKGRFTISRDNSKNTLYLQMNSLRAEDTAVYYCAKHDYSNYPYFDYWGQGTLVTVSS

SEQ ID NO: 1798 - protein, 120 aa, Synthetic construct
EVQLLESGGGLVQPGGSLRLSCAASGFTFSTYAMSWVRQAPGKCLEWVSLISGSGGRTYYADSVKGRFTISRDNSKNTLYLQMNSLRAEDTAVYYCAKHDYSNYPYFDYWGQGTLVTVSS

SEQ ID NO: 1799 - protein, 120 aa, Synthetic construct
EVQLLESGGGLVQPGGSLRLSCAASGFTFSTYAMSWVRQAPGKCLEWVSAISGSGGSTFYAESVKGRFTISRDNSKNTLSLQMNSLRAEDTAVYYCAKHDYSNYPYFDYWGQGTLVTVSS

SEQ ID NO: 1800 - protein, 120 aa, Synthetic construct
EVQLLESGGGLVQPGGSLRLSCAASGFTFSTYAMSWVRQAPGKGLEWVSAISGSGGSTFYAESVKGRFTISRDNSKNTLSLQMNSLRAEDTAVYYCAKHDYSNYPYFDYWGQGTLVTVSS

SEQ ID NO: 1801 - protein, 120 aa, Synthetic construct
EVQLLESGGGMVQPGGSLRLSCAASGFTFSTYAMSWVRQAPGKCLEWVSAISGSGGRTFYAESVEGRFTISRDNSKNTLYLQMNSLRAEDTAVYYCAKHDYSNYPYFDYWGQGTLVTVSS

SEQ ID NO: 1802 - protein, 120 aa, Synthetic construct
EVQLLESGGGMVQPGGSLRLSCAASGFTFSTYAMSWVRQAPGKGLEWVSAISGSGGRTFYAESVEGRFTISRDNSKNTLYLQMNSLRAEDTAVYYCAKHDYSNYPYFDYWGQGTLVTVSS

SEQ ID NO: 1803 - protein, 120 aa, Synthetic construct
EVQLLESGGGLVQPGGSLRLSCAASGFTFSTYAMSWVRQAPGKCLEWVSAISGSGGGTFYAESVKGRFTISRDNSKNTLYLQMNSLRAEDTAVYYCAKHDYSNYPYFDYWGQGTLVTVSS

SEQ ID NO: 1804 - protein, 120 aa, Synthetic construct
EVQLLESGGGLVQPGGSLRLSCAASGFTFSTYAMSWVRQAPGKGLEWVSAISGSGGGTFYAESVKGRFTISRDNSKNTLYLQMNSLRAEDTAVYYCAKHDYSNYPYFDYWGQGTLVTVSS

SEQ ID NO: 1805 - protein, 120 aa, Synthetic construct
EVQLLESGGGLVQPGGSLRLSCAASGFTFSTYAMSWVRQAPGKCLEWVSLISGSGGRTYYAESVKGRFTISRDNSKNTLYLQMNSLRAEDTAVYYCAKHDYSNYPYFDYWGQGTLVTVSS

SEQ ID NO: 1806 - protein, 120 aa, Synthetic construct
EVQLLESGGGLVQPGGSLRLSCAASGFTFSTYAMSWVRQAPGKGLEWVSLISGSGGRTYYAESVKGRFTISRDNSKNTLYLQMNSLRAEDTAVYYCAKHDYSNYPYFDYWGQGTLVTVSS

SEQ ID NO: 1807 - protein, 123 aa, Synthetic construct
QVQLVQSGAEVKKPGASVKISCKASGYNFTTYAMHWVRQAPGQGLEWMGWINGGNGDTRYSQKFRGRVTISRDTSASTAYMELHSLTSEDTALFYCARESGDYYSEISGALDWGQGTLVTVSS

SEQ ID NO: 1808 - protein, 118 aa, Synthetic construct
EVQLLESGGGLVQPGGSLRLSCAASGFTFSSYAMNWVRQAPGKGLEWVSVISGNSADKNYADSVKGRFTISRDNSKNTLYLQMNSLRAEDTAVYYCARGDGLNYLDYWGQGTLVTVSS

SEQ ID NO: 1809 - protein, 118 aa, Synthetic construct
QSVEESGGRLVTPGTPLTLTCTVSGFSLSTYTMNWVRQAPGKGLEWIGDIYTDGNTYYANWAKGRFTISKTSTTVDLKITSPTTEDTATYFCARDSWDASSYYGLDLWGQGTLVTVSS

SEQ ID NO: 1810 - protein, 79 aa, Synthetic construct
MSRLVAASWLLALLLCGITSTTTASSAPAASSTDGTAAAAVSHYAMNGFDELAKGAVVPEDHFVCGPADKCYCSAWLHS

SEQ ID NO: 1811 - protein, 122 aa, Synthetic construct
QVQLVQSGAEVKRPGAAVKVSCKASGYRFTGHYMHWVRQAPGQGLEWMGWINPNSGGTSYAQKFQGRVTMTRDTSISTAYMEMTRLRYDDTAVYYCAAGGLGGYYYYAMNIWGQGTTVTVSS

SEQ ID NO: 1812 - protein, 124 aa, Synthetic construct
EVQLLESGGGLVQPGGSLRLSCAASGFTFSTYAMGWVRQAPGKGLEWVSATSGSGGSTYYADSVKGRFTISRDNSKNTLYLQMNSLRAEDTAVYYCAKGGSQWLYAPGSWFDPWGQGTLVTVSS

SEQ ID NO: 1813 - protein, 126 aa, Synthetic construct
EVQLVQSGSELKKPGASLKLSCKASGYTYITPAMNWVRQAPGHGLEWMGGINTNTGNPTYAQGFAGRFVFSWDTSVSTAYLHISSLKTEDTAVYYCADTRIFSCRRGTCYGGFDVWGQGTMVTVSS

SEQ ID NO: 1814 - protein, 143 aa, Synthetic construct
QVFVQLVQSGGGLVQPGGSVRLSCTASGFLFSTYSMNWVRQAPGKGLEWVSSISTTSNYIYYADSVKGRFTISRSNGQGSLYLQLNSLRVEDTAVYYCARDTKVGAPRQDCYAMDLWGQRDHGHRLLSFHQGPIGLPPGALLQ

SEQ ID NO: 1815 - protein, 134 aa, Synthetic construct
FVQLVESGGGLVQPGGSLRLSCAASGFNFNTYWMNWVRQAPGKGLEWVANMKEDGSEKYYVDSVKGRFTISRDNAKNSLYLQMNSLRAEDTAVYYCARNPESRCIVGRNRGWCRYFDLWGRGSLVTVSPASTKG

SEQ ID NO: 1816 - protein, 141 aa, Synthetic construct
LVQLVESGGGVVQPGRSLRLSCAASGFTFSTYAMHWVRQAPGKGLEWVAVISYDGSNKFYADSVKGRFTISRDNSKNTLYLQMNSLRAEDTAVYYCARPKFLPGADIVVVVAATPFDYWGQGNPGHRLLSFHQGPIGLPPG

SEQ ID NO: 1817 - protein, 121 aa, Synthetic construct
EVQLVESGGGLVQPGGSLRLSCAASGFTFNTYWMNWVRQAPGRGLEWVANIKQDGGEKYYVDSVKGRFTISRDNAKNSLYLQMNSLRAEDTAMYYCARDGRSWYPDAFDIWGQGTVVTVSS

SEQ ID NO: 1818 - protein, 121 aa, Synthetic construct
EVQLLESGGGLVQPGGSLRLSCAASGFTFSSYAMNWVRQAPGKGLEWVSAISGSGGSTYYADSVKGRFTISRDNSKNTLYLQMSSLRAEDTAVYYCTRGRGIGYYNGMDVWGQGTTVTVSS

SEQ ID NO: 1819 - protein, 118 aa, Synthetic construct
QVQLQQSGAELARPGASVKMSCKASGYIFTTYAMHWVKQRPGQGLEWIGYINPTTVYTIYNQKFKDKATLTADKSSSTAYMQLSSLTSEDSAVYYCARLGGHWYFDVWGAGTTVTVSS

SEQ ID NO: 1820 - protein, 137 aa, Synthetic construct
MERHWIFLLLLSVTAGVHSQVQLQQSGAELARPGASVKMSCKASGYIFTTYAMHWVKQRPGQGLEWIGYINPTTVYTIYNQKFKDKATLTADKSSSTAYMQLSSLTSEDSAVYYCARLGGHWYFDVWGAGTTVTVSS

SEQ ID NO: 1821 - protein, 120 aa, Synthetic construct
EFQLLESGGGLVQPGGSLRLSCAASGFTFSTYAMSWVRQAPGKGLEWVSTISGSGSSTYDADSVKGRFTISRDKFKSTVYLQMNSLRAEDTAVYYCARDVLYSGSYFDYWARNTMVTVSS

SEQ ID NO: 1822 - protein, 98 aa, Synthetic construct
EVQLLESGGGLVQPGGSLRLSCAASGFTFSTYAMSWVRQAPGKGLEWVSTISGSGSSTYDADSVKGRFTISRDKFKSTVYLQMNSLRAEDTAVYYCAR

SEQ ID NO: 1823 - protein, 120 aa, Synthetic construct
EVQLLESGGGLVQPGGSLRLSCAASGFTFPTYAMGWVRQAPGKGLEWVSFIPGAGGVTYYADSVKGRFTISRDNSKNTLYLQMNSLRAEDTAVYYCAKAVDGLANAFDYWGQGTLVTVSS

SEQ ID NO: 1824 - protein, 119 aa, Synthetic construct
QVQLVQSGGGLVQPGGSLRLSCAASGFSFSTYAMSWVRQAPGKGLEWVSGISGSGRTPYYADSVKGRFTISRDNDKNSLYLQITSLRAEDTAVYYCARNDIFTGSLPDWGQGTLVTVSS

SEQ ID NO: 1825 - protein, 111 aa, Synthetic construct
QVQLVESGGGLVQPGGSLRLSCAASGFPFNTYWMNWVRQAPGKGLEWVANINPDGSEKYYLDSVKGRFTISRDNAKNSLFLQMNSLRAEDTAVYYCGVVVWGRGTTVTVSS

SEQ ID NO: 1826 - protein, 119 aa, Synthetic construct
QVQLVQSGGGLVKPGGSLRLSCAASGFIFNTYTMNWVRQAPGKGLEWVSSITSRGTYIFYSDSLKGRFTISRDNANNSLFLQMNSLRVEDTAVYYCSRDRGYTFGPDYWGQGTLVTVSS

SEQ ID NO: 1827 - protein, 122 aa, Synthetic construct
EVQLLESGGGLVQPGESLRLSCAASGFTFSSYAMNWVRQAPGKGLEWVSTISGSGGYIYYADSVKGRFTISRDNSKNTLYLQMNSLRAEDTAVYFCAKDSRYNWNYGNFDYWGQGTLVTVSS

SEQ ID NO: 1828 - protein, 122 aa, Synthetic construct
EVQLLESGGGLVQPGGSLRLSCAASGFTSITYAMSWVRQAPGKGLEWVSAISVSGTNTYYADSVKGRFTISRDKSKNMLYLQMNSLRAEDTAVYYCAKDLLHNWKYGTFDIWGQGTMVTVSS

SEQ ID NO: 1829 - protein, 119 aa, Synthetic construct
QIQLVQSGPELKKPGETVKISCKASGYTFTTYGMNWVKQAPGKGLKWMGWINTYSGVPSSANDFKGRFAFSLETSASTAYLQINNLKNEDTATYFCARSELRNWYFDVWGTGTTVTVSS

SEQ ID NO: 1830 - protein, 117 aa, Synthetic construct
QIQLVQSGPELKKPGETVKISCKASGYTLTTYGMNWVKQAPGKGLKWMGWINTYSGVPAYADDFKGRFAFSLETSASTAYLQINNFKNEDTATYFCARSELRNWYFDVWGTGTTVSS

SEQ ID NO: 1831 - protein, 119 aa, Synthetic construct
QIQLVQSGPELKKPGETVKISCKASGYTFTTYGMNWVKQAPGKGLKWMGWINSYSGVPAYADDFKGRFAFSLETFASTAYLQINNLRDEDTATYFCARSELRNWYFDVWGTGTTVTVSS

SEQ ID NO: 1832 - protein, 119 aa, Synthetic construct
QIQLVQSGPELKKPGETVKISCKASGYTFTTYGMNWVKQAPGKGLKWMGWINTYSGVPSSADDFKGRFAFSLETSASTAYLLINNLKNEDTATYFCARSELRNWYFDVWGTGTTVTVSS

SEQ ID NO: 1833 - protein, 115 aa, Synthetic construct
EVQLVESGGGLVQAGGSLRLSCAASGRTYAMGWYRQAPGKQRDLVATISGAGNTKYADSVKGRFTISRDNAKNTMYLQMNSLKPEDTAVYYCAAGKWFPAANEYWGQGTQVTVSS

SEQ ID NO: 1834 - protein, 113 aa, Synthetic construct
QVQLQQPGVELVRPGASVKLSCKASGYTFTTYWMNWVRQRPGQGLDWIGMIDPSDSETHYNQMFKDKATLTVDKSSSTAYIQLNSLTSEDSAVYYCSRSLAFWGQGTLVTVSA

SEQ ID NO: 1835 - protein, 113 aa, Synthetic construct
EVQLVQSGAEVKKPGASVKVSCKASGYTFTTYWMNWVRQAPGQGLEWIGMIDPSDSETHYNQMFKDRATLTVDTSTSTAYLELSSLRSEDTAVYYCSRSLAFWGQGTLVTVSS

SEQ ID NO: 1836 - protein, 113 aa, Synthetic construct
EVQLVQSGAEVKKPGASVKVSCKASGYTFTTYYMNWVRQAPGQGLEWIGMIDPSDSETHYNQKFQGRATLTVDTSTSTAYLELSSLRSEDTAVYYCSRSLAFWGQGTLVTVSS

SEQ ID NO: 1837 - protein, 113 aa, Synthetic construct
EVQLVQSGAEVKKPGASVKVSCKASGYTFTTYWMNWVRQAPGQGLEWIGMIDPSDSETHYNQMFKDRATLTVDKSTSTAYLELSSLRSEDTAVYYCSRSLAFWGQGTLVTVSS

SEQ ID NO: 1838 - protein, 113 aa, Synthetic construct
EVQLVQSGAEVKKPGASVKVSCKASGYTFTTYWMNWVRQAPGQGLEWIGMIDPSDSETHYNQMFKDRATITVDTSTSTAYLELSSLRSEDTAVYYCSRSLAFWGQGTLVTVSS

SEQ ID NO: 1839 - protein, 113 aa, Synthetic construct
EVQLVQSGAEVKKPGASVKVSCKASGYTFTTYWMNWVRQAPGQGLEWIGMIDPSDSETHYNQMFKDRVTLTVDTSTSTAYLELSSLRSEDTAVYYCSRSLAFWGQGTLVTVSS

SEQ ID NO: 1840 - protein, 120 aa, Synthetic construct
EVQLLESGGGLVQPGGSLRLSCAASGFTFSRYAMNWVRQAPGKGLEWVSGISGSGGRTYYADSVKGRFTISRDNSKNTLYLQMNSLRAEDTAVYYCAKDRDFWSGPFDYWGQGTLVTVSS

SEQ ID NO: 1841 - protein, 120 aa, Synthetic construct
EVQLLESGGGLVQPGGSLRLSCAASGFTFSRYAMNWVRQAPGKGLEWVSGISGSGGSTYYADSVKGRFTISRDNSKNTLYLQMNSLRAEDTAVYYCAKDRDFWSGPFDYWGQGTLVTVSS

SEQ ID NO: 1842 - protein, 122 aa, Synthetic construct
QVQLQESGGDLVKPGGFLRLSCAASGFTFNTYTMNWVRQAPGKGLEWLSSISSRSNYINYADSVKGRFTISRDNAKNSLYLQMNSLRAEDTAVYYCARFGRKGDLNWVFDYWGQGTLVTVSS

SEQ ID NO: 1843 - protein, 110 aa, Synthetic construct
QSALTQPPSASGSPGQTVTISCTGTSTDVGGYNYVSWYQQHPGKAPKLMIYSTSKRPSGVPDRFSGSKSGNTASLTVSGLQAEDEADYFCSTTTYAKNPVFGGGTKLTVL

SEQ ID NO: 1844 - protein, 121 aa, Synthetic construct
EVQLLEPGGGLVQPGGSLRLSCEASGSTFSTYAMSWVRQAPGKGLEWVSGFSGSGGFTFYADSVRGRFTISRDSSKNTLFLQMSSLRAEDTAVYYCAIPARGYNYGSFQHWGQGTLVTVSS

SEQ ID NO: 1845 - protein, 119 aa, Synthetic construct
QIQLIQSGPEVKKPGETVKISCKASGYTFTTYAMTWVKQAAGKGLKWMGWIHTYSGVPTYVDDFKGRFAFSLDTSANTAYLQINNLKNEDTATYFCARYDGPLYAMDFWGQGTSVTVSS

SEQ ID NO: 1846 - protein, 120 aa, Synthetic construct
MAQVQLVQSGSELKKPGASVKVSCKASGYTFTSYAMNWVRQAPGQGLEWMGWINTNTGNPTYAQGFTGRFVFSLDTSVSTAYLQISSLKAEDTAVYYCASRLAAAGFDYWGQGTLVTVSS

SEQ ID NO: 1847 - protein, 113 aa, Synthetic construct
EVQLVESGGGLVQPGGSLRLSCAASGFTFSTYAMSWVRQAPGKGLEWVSSIGENDRTTYYVDSVKGRFTISRDNSKSTLYLQMNSLRAEDTAVYYCAKDGVHWGQGTLVTVSS

SEQ ID NO: 1848 - protein, 121 aa, Synthetic construct
QVQLVQSGGGVVQPGRSLRLSCAASGFSFSTYDMNWVRQAPGKGLEWLSIISYDETNKYYADSVKGRFTISRDNSKNTLFLQMNSLKPEDSAVYHCVKVGWTLVGDGVDMWGQGTLVTVSS

SEQ ID NO: 1849 - protein, 124 aa, Synthetic construct
EVQLVESGGGLVQPGGSLRLSCAASGFTFSTYGMNWVRQAPGKGLEWVSYISSGGSSIYYADSVKGRFTISRDNAKNSLYLQMNSLRAEDTAVYYCAGSRYTYAYGGGYEFHFWGQGTLVTVSS

SEQ ID NO: 1850 - protein, 124 aa, Synthetic construct
EVQLVESGGGLVQPGGSLRLSCAASGFTFSTYGMNWVRQAPGKGLQWVSYISSGGSSIYYADSVKGRFTISRDNAKNSLYLQMNSLRAEDTAVYYCAGSRYTYAYGGGYEFHFWGQGTLVTVSS

SEQ ID NO: 1851 - protein, 119 aa, Synthetic construct
EVQLLESGGGLVQPGGSLRLSCAASGFTFSSYAMNWVRQAPGKGLEWVSTISSSGSRTYYADSVKGRFTISRDNSKNTLYLQMNSLRAEDTAVYYCAKGLVASAPFDYWGQGTLVTVSS

SEQ ID NO: 1852 - protein, 121 aa, Synthetic construct
EVQLLESGGGLVQPGGSLRLSCAASGFTFSSYAMNWVRQAPGKGLEWVSGISGGGSSTTYYADSVKGRFTISRDNSKNTLYLQMNSLRAEDTAVYYCAKPYYWVDSFFDYWGQGTLVTVSS

SEQ ID NO: 1853 - protein, 82 aa, Synthetic construct
SLKLSCAASGLTFNIYAMNWVRQAPGKGLEWVARIRNKSNNYATYYADSVKDRFTISRDDSQSLLYLQMNNLKTEDTAMYYC

SEQ ID NO: 1854 - protein, 118 aa, Synthetic construct
QSVEESGGRLVTPGTSLTLTCTASGFSLSTYAMIWVRQAPGKGLEWIGIINSSGYTYYANWAKGRFTISKTSTTVDLKITSPTTEDTATYFCARGNAGISYDVSFNLWGQGTLVTVSS

SEQ ID NO: 1855 - protein, 121 aa, Synthetic construct
QSVEESGGRLVTPGTPLTLTCTVSEIDLSTYAMSWVRQAPGKGLEWIGIISAGGSAYYASWAKGRFTISRTSTTVDLKMTSLTTEDTATYFCARGAAYAGYTYGFSFFDIWGPGTLVTVSL

SEQ ID NO: 1856 - protein, 135 aa, Synthetic construct
MMMPANYSVIAENEMTYVNGGANFIDAIGAVTAPIWTLDNVKTFNTNIVTLVGNTFLQSTINRTIGVLFSGNTTWKEVGNIGKNLFGTNVKGNPIEKNNFGDYAMNALGIAAAVYNLGVAPTKNTVKETEVKFTV

SEQ ID NO: 1857 - protein, 113 aa, Synthetic construct
NFIDAIGAVTAPIWTLDNVKTFNTNIVTLVGNTFLQSTINRTIGVLFSGNTTWKEVGNIGKNLFGTNVKGNPIEKNNFGDYAMNALGIAAAVYNLGVAPTKNTVKETEVKFTV

SEQ ID NO: 1858 - protein, 119 aa, Synthetic construct
QVQLVQSGSELKKPGASVKVSCKTSGYTFTTYAMNWVRQAPGQGLEWMGWINTNTGNPTYAPGFTGRFVFSFDTSVSTAYLQISSLKAEDTAVYYCARVYSYGVPFDYWGQGTLVTVSS

SEQ ID NO: 1859 - protein, 120 aa, Synthetic construct
EVQLVESGGGLVQPGGSLRLSCAASGIDFSRYWMSWVRQAPGKGLEWVAEINPEAGKWNYAPSLKDRFTISRDNAKNSLYLQMNSLRAEDTAVYYCARQDDYTTYAMDYWGQGTTVTVSS

SEQ ID NO: 1860 - protein, 120 aa, Synthetic construct
EVQLVESGGGLVQPGGSLRLSCAASGIDFSRYWMSWVRQAPGKGLEWVAEINPESSTINYAPSLKDRFTISRDNAKNSLYLQMNSLRAEDTAVYYCARQDDYLTYAMDYWGQGTTVTVSS

SEQ ID NO: 1861 - protein, 120 aa, Synthetic construct
EVQLVESGGGLVQPGGSLRLSCAASGIDFSRYWMSWVRQAPGKGLEWVAEINPESTGINYAPSLKDRFTISRDNAKNSLYLQMNSLRAEDTAVYYCARQDDYWTYAMDYWGQGTTVTVSS

SEQ ID NO: 1862 - protein, 119 aa, Synthetic construct
QVQLVQSGAEVKKPGSSVKVSCKASGGTFSTYAFNWVRQAPGQGLEWMGVINTGGGSVTYAQKFQGRVTITADESTSTAYMELSSLRSEDTAVYYCAGGSGISTPGAVWGQGTLVTVSS

SEQ ID NO: 1863 - protein, 131 aa, Synthetic construct
EVQLLESGGGLVQPGGSLRLSCAASGFTFSDYAMNWVRQAPGKGLEWVAGIGNDGSYTNYGAAVKGRATISRDNSKNTLYLQMNSLRAEDTAVYYCASDIRSRNDCSYFLGGCSSGFIDVWGQGTLVTVSS

SEQ ID NO: 1864 - protein, 117 aa, Synthetic construct
EVQLVESGGGLVKPGGSLRLSCAASGFTFTTYAMSWVRQAPGKGLEWVATISSGGTYTYYADSVKGRFTISRDNAKNSLYLQMNSLRAEDTAVYYCATQGNYSLDFWGQGTTVTVSS

SEQ ID NO: 1865 - protein, 120 aa, Synthetic construct
QVQLVESGGGVVQPGRSLRLSCVASGFIFRTYAMHWVRQAPGKGLEWVAVIWPDGSERYYSDSTKGRFTVSRDNSKNTLFLQMNSLRVDDTAMYYCFARGYSDSDYADHWGRGTRVTVSS

SEQ ID NO: 1866 - protein, 122 aa, Synthetic construct
EVQLLESGGGLVQPGGSLRLSCAASGFTFSAYAMNWVRQAPGKGLEWVSAISNSGTYTYYADSVKGRFTISRDNSKNTLYLQMNSLRAEDTAVYYCARGLDFIVGYTGNDYWGQGTLVTVSS

SEQ ID NO: 1867 - protein, 122 aa, Synthetic construct
EVQLLESGGGLVQPGGSLRLSCAASGFTFSSYAMNWVRQAPGKGLEWVSAISNSGTYTYYADSVKGRFTISRDNSKNTLYLQMNSLRAEDTAVYYCARGLDFIVGRTGNDYWGQGTLVTVSS

SEQ ID NO: 1868 - protein, 119 aa, Synthetic construct
EVQLLESGGGLVQPGGSLRLSCAASGFTFSSYAMNWVRQAPGKGLEWVSAISGRGGTTYYADSVKGRFTISRDNSKNTLYLQMSSLRAEDTAVYYCAKARANWDYFDYWGQGTLVTVSS

SEQ ID NO: 1869 - protein, 121 aa, Synthetic construct
QVQLVQSGAEVKKPGSSVKVSCKASGGTFRTYAINWVRQAPGQGLEWMGRINTVLGIVNHAQKFQGRVTITADKSTNTAYMELNSLRSEDTAVYYCAREKGVDYYYGIEVWGQGTTVTVSS

SEQ ID NO: 1870 - protein, 119 aa, Synthetic construct
EVQLLESGGGLVQPGGSLRLSCAASGFTFSSYAMNWVRQAPGKGLEWVSAISGRGGTTYYADSVKGRFTISRDNSKSTLCLQMNSLRAEDTAVYYCAKARANWDYFDYWGQGTLVTVSS

SEQ ID NO: 1871 - protein, 124 aa, Synthetic construct
EVQLLESGGGLVQPGGSLRLSCAASGFTFTDYAMNWVRQAPGKGLEWVSTISGSGYATYYADSVKGRFTISRDNSKTTLYLQMNSLRAEDTAVYYCAKGHTLGSGSYYTLFDYWGQGTLVTVSS

SEQ ID NO: 1872 - protein, 114 aa, Synthetic construct
EVQLVQSGGGVVRPGGSLRLSCAASGFTFSTYEMNWVRQAPGKGLEWLAYIGGSGSPIYYADSVRGRFTISRDNTKNSLFLQMSSLRAEDTAVYYCVEGWFDKWGLGTLVTVSS

SEQ ID NO: 1873 - protein, 127 aa, Synthetic construct
EVQLVESGGGLVQPGGSLRLSCAASGFIFSSYAMNWVRQAPGKGLEWVSGISGSGGGAYYADSVKGRFTISRDNSKNTLYLQMNSLRAEDTAVYYCVTNLDNSRDYFPHYFHDMDVWGQGTLVTVSS

SEQ ID NO: 1874 - protein, 127 aa, Synthetic construct
EVQLVESGGGLVQPGGSLRLSCAASGFRFNTYAMHWVRQAPGKGLEWVAVISSSGRNKFYADSVKGRFTISRDNSKNTLYLQMNSLRAEDTAVYYCVTNMDNSRDYFPHYFHDMDVWGQGTLVTVSS

SEQ ID NO: 1875 - protein, 127 aa, Synthetic construct
EVQLVESGGGLVQPGGSLRLSCAASGFKFNTYAMHWVRQAPGKGLEWVSAISITGGNTYYADSVKGRFTISRDNSKNTLYLQMNSLRAEDTAVYYCVTNMDNSRDYFPHYFHDMDVWGQGTLVTVSS

SEQ ID NO: 1876 - protein, 127 aa, Synthetic construct
EVQLVESGGGLVQPGGSLRLSCAASGFTFSTYAMHWVRQAPGKGLEWVSGVSWNGSRTHYADSVKGRFTISRDNSKNTLYLQMNSLRAEDTAVYYCVTNMDNSRDYFPHYFHDMDVWGQGTLVTVSS

SEQ ID NO: 1877 - protein, 118 aa, Synthetic construct
EVQLVESGGGLVKPGGSLRLSCAASGFTFRTYAMSWVRQTPEKRLEWVATITSGGTYIYYLDSVKGRFTISRDNAKNVLYLQMSSLRSEDTAMYYCVRLYGYDGMDYWGQGTSVTVSA

SEQ ID NO: 1878 - protein, 121 aa, Synthetic construct
QLQLVESGGGAVQPGRSLKLSCAASGFNFSTYAMHWVRQAPGRGLEWVAVTSFDGSNEYYIDSVKGRFTISRDNTKNTLYLQMTGLRVEDTALYFCARDEYTGGWYSVGYWGQGTLVTVSS

SEQ ID NO: 1879 - protein, 121 aa, Synthetic construct
QLQLVESGGGAVQPGRSLKLSCAASGFTFSTYAMHWVRQAPGRGLEWVAVTSFDGSNEYYIDSVKGRFTISRDNTKNTLYLQMTGLRVEDTALYFCARDEYTGGWYSVGYWGQGTLVTVSS

SEQ ID NO: 1880 - protein, 121 aa, Synthetic construct
QLQLVESGGGAVQPGRSLKLSCAASGFTFSTYAMHWVRQAPGRGLEWVAVTSFDGSNEYYIDSVKGRFTISRDNTKNTLYLQMTGLRVEDTALYFCARDEYTGGFYSVGYWGQGTLVTVSS

SEQ ID NO: 1881 - protein, 121 aa, Synthetic construct
QLQLVESGGGAVQPGRSLKLSCAASGFNFSTYAMHWVRQAPGRGLEWVAVTSFEGSNEYYIDSVKGRFTISRDNTKNTLYLQMTGLRVEDTALYFCARDEYTGGWYSVGYWGQGTLVTVSS

SEQ ID NO: 1882 - protein, 121 aa, Synthetic construct
QLQLVESGGGAVQPGRSLKLSCAASGFQFSTYAMHWVRQAPGRGLEWVAVTSFDGSNEYYIDSVKGRFTISRDNTKNTLYLQMTGLRVEDTALYFCARDEYTGGWYSVGYWGQGTLVTVSS

SEQ ID NO: 1883 - protein, 115 aa, Synthetic construct
EVQLVESGGGLVQAGGSLRLSCTGSRSIFSTYAMAWHRQAPGKQRELVGFIYWGGTTTYSDSVKGRFTISRDNAKNTMYLQMNSLKPEDAGVYYCNIYGSYALPWGQGTLVTVSS

SEQ ID NO: 1884 - protein, 115 aa, Synthetic construct
EVQLVESGGGLVQAGGSLRLSCTGSRNIFSTYAMAWHRQAPGKQRELVGFIYWGGTTSYVDSVKGRFTISRDNAKNTMYLQMNSLKPEDAAVYYCNIYGSYALPWGQGTLVTVSS

SEQ ID NO: 1885 - protein, 115 aa, Synthetic construct
EVQLVESGGGLVQAGGSLRLSCTGSRSIFSTYAMAWHRQAPGKQRELVGFIYWGGTTTYSDSVKGRFTISRDNAKNTMYLQMNSLKPEDAGVYYCNIYGSYALPQGQGTLVTVSS

SEQ ID NO: 1886 - protein, 115 aa, Synthetic construct
EVQLVESGGGMVQAGGSLRLSCTGSRNIFSTYAMAWHRQAPGKQRELVGFIYWGGTTSYVDSVKGRFTISRDNAKNTMYLQMNSLKPEDAAVYYCNIYGSYALPWGQGTQVTVSS

SEQ ID NO: 1887 - protein, 115 aa, Synthetic construct
EVQLVESGGGLVQAGGSLRLSCTGSRSIFSTYAMAWHRQAPGKQRELVGFIYWGGTTSYVDSVKGRFTISRDNAKNTMYLQMNSLKPEDAAVYYCNIYGSYALPWGQGTLVTVSS

SEQ ID NO: 1888 - protein, 115 aa, Synthetic construct
EVQLVESGGGLVQAGGSLRLSCTGSRSIFSTYAMAWHRQAPGKQRELVGFIYWGGTTTYSDSVKGRFTISRDNAKSTMYLQMNSLKPEDAGVYYCNIYGSYALPWGQGTLVTVSS

SEQ ID NO: 1889 - protein, 115 aa, Synthetic construct
EVQLVESGGGVVQPGGSLRLSCTGSRSIFSTYAMAWHRQAPGKQRELVGFIYWGGTTTYADSVKGRFTISRDNSKNTLYLQMNSLRPEDTALYYCNIYGSYALPWGQGTLVTVSS

SEQ ID NO: 1890 - protein, 124 aa, Synthetic construct
EVQLLESGGGLVQPGGSLRLSCAASGFTFSSYAMNWVRQAPGKGLEWVSAITMSGITAYYTDDVKGRFTISRDNSKNTLYLQMNSLRAEDTAVYYCAKEEFLPGTHYYYGMDVWGQGTTVTVSS

SEQ ID NO: 1891 - protein, 122 aa, Synthetic construct
EVQLLESGGGLVQPGGSLRLSCAASGFTFGTYAMTWVRQAPGKGLEWVSSISASGYYANYAGSVKGRFTISRDNSKNTLYLQMNSLRAEDTAVYYCARPYLGDRRSYGFDHWGQGTLVTVSS

SEQ ID NO: 1892 - protein, 123 aa, Synthetic construct
ELQLVESGGGLVQPGGSLRLSCSASGFTFGAYAMNWVRQAPGKGLEWVSGVNSGGGLTSYGESVKGRFTISRDNAKNTLYLQMNRLNPDDTAVYYCAKSKRGAVVAGTGDDYWGQGTQVTVSS

SEQ ID NO: 1893 - protein, 121 aa, Synthetic construct
QLQLVESGGGLVQAGGSLRLSCVASGRTFSTYAMDWFRQAPGKEREFVAAISWHSAIYYADAVKGRFTISRDNGKNTMYLQMNNLKPEDTAVYFCAAALRYRFNPSAMEYWGKGTLVTVSS

SEQ ID NO: 1894 - protein, 122 aa, Synthetic construct
QLQLVESGGGLVQPGGSLRLSCAASENSVSTYAMGWFRQAPGKEREFVAAITRAGGNTYNADSVKGRFTISRDNAENTIYLQMNSLKPEDTAVYSCAAGPRYSTISTMFPYWGQGTQVTVSS

SEQ ID NO: 1895 - protein, 119 aa, Synthetic construct
EVQVQESGGGLVHPGGSLKLSCAASGFTFDTYAMSWVRQAPGKGLEWVSAISWSGGETFYAESMKGRFTISRNNAKNTLYLQMNSLKSEDTAVYYCARGMGLAEGLTDWGQGTQVTVSS

SEQ ID NO: 1896 - protein, 115 aa, Synthetic construct
EVQLVESGGGLVKPGGSLKLSCAASGFTFSTYAMSWVRQTPEKRLEWVAAIKSNGGSTYYPDTVKDRFTISRDNAKNTLYLQMSSLRPEDTALYYCAHGLLFAHWGQGTLVTVSA

SEQ ID NO: 1897 - protein, 118 aa, Synthetic construct
QSVKESEGRLVTPGTPLTLTCTVSGFSLSTYAMSWVRQAPEKGLEWIGIIYATAETYYATWARGRFTISKTSTTVDLKITSPATEDTATYFCARLNGDGSGTYAYDIWGPGTLVTVSS

SEQ ID NO: 1898 - protein, 119 aa, Synthetic construct
EVQLVESGGGLVKPGGSLKLSCAASGFTFSRYAMSWVRQTPEKRLEWVATISTAGSYTYYPDSVKGRFTISRDNAKNTLYLQMSSLRSEDTALYYCARQGTGTYAMDYWGQGTSVTVSS

SEQ ID NO: 1899 - protein, 119 aa, Synthetic construct
EVQLVESGGGLVKPGGSLKLSCAASGFTFSKNAMSWVRQTPEKRLEWVATISTGGTYTYYPDSVKGQFTISRDNAKNTLYLQMSSLRSEDTAMYFCARQRTGTYAMDHWGQGTSVTVSS

SEQ ID NO: 1900 - protein, 126 aa, Synthetic construct
QVQLQESGGGLVQAGGSLRLSCAASGRTFSTYAMGWFRQAPGKERGLVAAISWSGGSTYYADSVKGRFTIFRDNAENTVYLQMNSLKPEDTAVYYCAAEAEGSGREGNFYERSWYQGQGTQVTVSS

SEQ ID NO: 1901 - protein, 126 aa, Synthetic construct
QVQLQESGGGLVQAGGSLRLSCEASGRTFSTYAMAWFRQAPGKERDLVAAISWSGGSTEYHDSVKGRFTISRDNTKNTVYLQMNSLKAEDTAVYYCAAEVEGSGREGNFYGASWYPGQGTQVTVSS

SEQ ID NO: 1902 - protein, 120 aa, Synthetic construct
EVQLLESGGGLVQPGGSLRLSCAASGFTFSTYAMSWVRQAPGKGLEWVSAISGSGGSTYYADSVKGRFTISRDNSKNTLYLQMNSLRAEDTAVYYCARAMARKSVAFDIWGQGTMVTVSS

SEQ ID NO: 1903 - protein, 112 aa, Synthetic construct
EVQLVESGGGLVQPGGSLRLSCVASGFTFRTYAMSWVRQAPGKGSEWVSTINNGGGVTGYADSVEGRFTISRDNAKNTLYLQMNSLKPEDTAVYYCAKGTSRGQGTQVTVSS

SEQ ID NO: 1904 - protein, 122 aa, Synthetic construct
EVQLVESGGGLVKPGGSLRLSCAASGFTFSTYTMNWVRQAPGKGLEWVSSISSSSNYIDDADSVKGRFTISRDNAKHSLYLQMNSLRADDTAVYYCARLGREWDLLFHFDYWGQGTLVTVSS

SEQ ID NO: 1905 - protein, 133 aa, Synthetic construct
EVQLVESGGGLVQPGRSLRLSCTASGFNFRDYAMNWVRQAPGKGLEWVGFIRAMAYAGTTEYAASVKGRFIISRDDSNGIAYLQMNSLKTEDTAVYYCVREFYDFWSGYYNPHFDYWGQGTLVAVSSASTKGP

SEQ ID NO: 1906 - protein, 124 aa, Synthetic construct
EVQLLESGGGLVQPGGSLTLSCAASGFAFNTYAMIWVRQAPGKGLEWVSSITGGSATNVADSVKGRFIVSRDNSKNTVFLQMKSLRVDDTALYYCARGSQKLQQYKYYYYMDVWGKGTPVTVSS

SEQ ID NO: 1907 - protein, 138 aa, Synthetic construct
MDFGLRWVFLVALLRGGQCQVQLVESGGGAAQPGNSLRLSCAASGFIFRTYAMHWVRQAPGKGLEWVAIISEDGIEEHYGDSEKGRFTVSRDNSRNTLHLQMYNLTSEDTAVYYCARAPSRRSPLDYWGQGTLVTVSS

SEQ ID NO: 1908 - protein, 144 aa, Synthetic construct
MDPKGSLSWRILLFLSLAFELSYGEVKLVESGGGLVQPGGSLRLSCAASGFTFRTYAMSWVRQAPGKGLEWVATIGSDRRHTYYPDSVKGRFTISRDNAKNTLYLQMNSLRAEDTAVYYCVGPYDGYYGEFDYWGQGTLVTVSS

SEQ ID NO: 1909 - protein, 120 aa, Synthetic construct
EVQLVESGGGLVQPGGSLRLSCAASGFTFRTYAMSWVRQAPGKGLEWVATIGSDRRHTYYPDSVKGRFTISRDNSKNTLYLQMNSLRAEDTAVYYCVGPYDGYYGEFDYWGQGTLVTVSS

SEQ ID NO: 1910 - protein, 144 aa, Synthetic construct
MDPKGSLSWRILLFLSLAFELSYGEVKLVQSGAEVKKPGASVKVSCKASGFTFRTYAMSWVRQAPGQRLEWVATIGSDRRHTYYPDKFQGRVTITRDNAKNTLYMELSSLRSEDTAVYYCVGPYDGYYGEFDYWGQGTLVTVSS

SEQ ID NO: 1911 - protein, 107 aa, Synthetic construct
  VARIANT 3: note = X can be any amino acid
  VARIANT 5: note = X can be any amino acid
  VARIANT 6: note = X can be any amino acid
  VARIANT 7: note = X can be any amino acid
  VARIANT 10: note = X can be any amino acid
  VARIANT 30: note = X can be any amino acid
  VARIANT 31: note = X can be any amino acid
  VARIANT 50: note = X can be any amino acid
  VARIANT 51: note = X can be any amino acid
  VARIANT 52: note = X can be any amino acid
  VARIANT 55: note = X can be any amino acid
  VARIANT 58: note = X can be any amino acid
  VARIANT 62: note = X can be any amino acid
  VARIANT 68: note = X can be any amino acid
  VARIANT 69: note = X can be any amino acid
  VARIANT 70: note = X can be any amino acid
  VARIANT 71: note = X can be any amino acid
  VARIANT 75: note = X can be any amino acid
PGXSXXXSCXASGFTFRTYAMSWVRQAPGXXLEWVATIGSDRRHTYYPDXXXGRXTIXRDNXKNTLYXXXXSLRXEDTAVYYCVGPYDGYYGEFDYWGQGTLVTVSS

SEQ ID NO: 1912 - protein, 120 aa, Synthetic construct
EVQLLESGGGLVQPGGSLRLSCAASGFTFSNYAMNWVRQAPGKGLEWVSVISGRGGSTYYADSVKGRFTISRDNSRNTLYLQMNSLRAEDTAIYYCAKDGYSSAWFFDYWGQGTLITVSS

SEQ ID NO: 1913 - protein, 126 aa, Synthetic construct
EVQLVESGGGLVQPGGSLRLSCAAFGFTFVNYAMNWVRQAPGKGPEWVAVIYAAGDGANYGDSVKGRFTISRDNSRNTLYLQMNSLRAEDTAIYYCAKPAHYDDSGYPYMAYFDSWGQGTLVTVSS

SEQ ID NO: 1914 - protein, 121 aa, Synthetic construct
QVQLQQSGADLVRPGTSVKVSCKASGYAFTNYLIEWIKQRPGQGLEWIGVMNPGSGGTHYSEKFRGKATLTADKSSSTAYMQLISLTSDDSAVYFCARSDYDYVTYAMDYWGQGTSVTVSS

SEQ ID NO: 1915 - protein, 140 aa, Synthetic construct
MEWSGVFIFLLSVTAGVHSQVQLQQSGADLVRPGTSVKVSCKASGYAFTNYLIEWIKQRPGQGLEWIGVMNPGSGGTHYSEKFRGKATLTADKSSSTAYMQLISLTSDDSAVYFCARSDYDYVTYAMDYWGQGTSVTVSS

SEQ ID NO: 1916 - protein, 122 aa, Synthetic construct
EVQLVESGGGLVQPGGSLRLSCAASGFTFSTYSMNWVRQAPGKGLEWVSYISPSSSTIYYPDSLKGRFTISRDNAKNSLYLQMDSLRAEDTAQYYCAREYCSGGSCYLLDYWGQGTLVTVSS

SEQ ID NO: 1917 - protein, 118 aa, Synthetic construct
QVQLVQSGSELKKPGASVKVSCKASGYTFTTYAMNWVRQAPGQGPEWVGWINTNTGNPTYAQGFTGRFVLSLDTSVSTAFLQISSLKAEDTAVYYCARVIVPYAFDIWGQGTMVTVSS

SEQ ID NO: 1918 - protein, 119 aa, Synthetic construct
QVQLVESGGGLVQPGGSLRLSCAASGFAFRNYAMNWVRQAPGKGLEWVSAISGSGGSTYYADSVKGRFTISRDNSKNTLYLQMNSLRAEDTAVYYCARDYGGISPFDYWGQGTLVTVSS

SEQ ID NO: 1919 - protein, 122 aa, Synthetic construct
EVQLVESGGGLVQPGGSLRLSCAASGFTFSTYAMSWVRQAPGKGLEWVSAISGSGVSTYYADSVKGRFTLSRDNSKNTLYLQMNSLRAEDTAVYYCAKAYYDILTGNFLDYWGQGTLVTVSS

SEQ ID NO: 1920 - protein, 122 aa, Synthetic construct
EVQLVESGGGLVQPGGSLRLSCAASGFTFSSYAMNWVRQAPGKGLEWVSAISYSGRSTYYADSVKGRFTISRDNSKNTLYLQMNSLRAEDTAVYYCAKGLYDILTGGGFDYWGQGTLVTVSS

SEQ ID NO: 1921 - protein, 119 aa, Synthetic construct
QVQLVESGGGLVQPGGSLRLSCAASGFTFSSYAMNWVRQAPGKGLEWVSAISGSGGSTYYADSVKGRFTISRDNSKNTLYLQVNSLRAEDTAVYYCARDYGGISPFDYWGQGTLVTVSS

SEQ ID NO: 1922 - protein, 127 aa, Synthetic construct
QVQLQESGGGLVQAGGSLRLSCAASGRTFSTYAMGWFRQAPGKEREFVATISRSGDNIYYADSVKGRFTISRDNAKNTVSLQMNSLKVEDTAVYYCGRARGTGYAHTALNQYDYDYWGQGTQVTVSS

SEQ ID NO: 1923 - protein, 111 aa, Synthetic construct
QVQLQQSGGGLVQAGGSLKLSCAASGIAFSTYGMNWFRQTPGKQREYVAYITGNGDDNVAQSMEGRFTISRDNAKNTGYLQMNSLKPEDTGVYYCNIGMYWGQGTQVTVSS

SEQ ID NO: 1924 - protein, 120 aa, Synthetic construct
EVQLVESGGGLVQPGGSLRLSCAASGFTFSFYAMNWVRQAPGKGLEWVSYISPDASTIYYADSVKGRFTISRDNAKNSLYLQMNSLRAEDTAVYYCARGVLDYGDMLDPWGQGTLVTVSS

SEQ ID NO: 1925 - protein, 118 aa, Synthetic construct
QSLEESGGRLVTPGTPLTLTCTVSGFSLSSYAMNWVRQAPGKGLEWITFIGTGGDIYYANWAKGRFTISKTSTTVDLKIASPTTEDTATYFCARGDTGGSLYRHFNLWGPGTLVTVTS

SEQ ID NO: 1926 - protein, 125 aa, Synthetic construct
EVQLLESGGGWVQPGGSLRLSCAASGFAFSNYAMNWVRQTPGKGLEWVSVISSSGGNTYYADSVKGRFAISRDNSRDTLHLQMNRLRVEDTAVYYCAKEIRPYYDLSYYYGMDVWGQGTTVTVSS

SEQ ID NO: 1927 - protein, 112 aa, Synthetic construct
EVQLLESGGGLVQPGGSLRLSCTASGFTFSTYALNWVRQAPGKGLEWVAGINGTGYNTYYADSVRGRFTISRDNSKNTVTLEMNSLRVEDTATYYCHKVPWWGQGTLVSVSS

SEQ ID NO: 1928 - protein, 115 aa, Synthetic construct
LVQLVESGGGLVQPGGSLKLSCAASGFTFNTYAMNWVRQASGKGLEWVARIRSKSNNYATYYAASVKGRFTISRDDSKSMAYLQMDSLKTEDTAVYYCVGGGDFWGQGTLVTVSS

SEQ ID NO: 1929 - protein, 115 aa, Synthetic construct
LVQLVESGGGLVQPGGSLKLSCAASGFTFNTYAMHWVRQASGKGLEWVGRIRSKSNNYATAYAASVKGRFTISRDDSKNTAYLQMDSLKTEDTAVYYCVGGGDFWGQGTLVTVSS

SEQ ID NO: 1930 - protein, 115 aa, Synthetic construct
EVQVVESGGGLVQPGGSLKLSCAASGFTFNTYAMNWVRQASGKGLEWVARIRSKSNNYATYYADSVKGRFTISRDDSKSMVYLQMDSLKTEDTAVYYCVGGGDFWGQGTLVTVSS

SEQ ID NO: 1931 - protein, 115 aa, Synthetic construct
LVQLVESGGGLVQPGGSLKLSCAASGFTFNTYAMNWVRQASGKGLEWVGRIRSKSNNYATYYAASVKGRFTISRDDSKSMAYLQMDSLKTEDTAVYYCVGGGDFWGQGTLVTVSS

SEQ ID NO: 1932 - protein, 115 aa, Synthetic construct
EVQLVESGGGLVQPGGSLKLSCAASGFTFNTYAMHWVRQASGKGLEWVGRIRSKSNNYATAYAASVKGRFTISRDDSKNTAYLQMDSLKTEDTAVYYCVGGGDFWGQGTLVTVSS

SEQ ID NO: 1933 - protein, 115 aa, Synthetic construct
LVQVVESGGGLVQPGGSLKLSCAASGFTFNTYAMHWVRQASGKGLEWVGRIRSKSNNYATAYAASVKGRFTISRDDSKNTAYLQMDSLKTEDTAVYYCVGGGDFWGQGTLVTVSS

SEQ ID NO: 1934 - protein, 115 aa, Synthetic construct
LVQLVESGGGLVQPGGSLKLSCAASGFTFNTYAMNWVRQASGKGLEWVGRIRSKSNNYATAYAASVKGRFTISRDDSKNTAYLQMDSLKTEDTAVYYCVGGGDFWGQGTLVTVSS

SEQ ID NO: 1935 - protein, 115 aa, Synthetic construct
LVQLVESGGGLVQPGGSLKLSCAASGFTFNTYAMHWVRQASGKGLEWVARIRSKSNNYATAYAASVKGRFTISRDDSKNTAYLQMDSLKTEDTAVYYCVGGGDFWGQGTLVTVSS

SEQ ID NO: 1936 - protein, 115 aa, Synthetic construct
LVQLVESGGGLVQPGGSLKLSCAASGFTFNTYAMHWVRQASGKGLEWVGRIRSKSNNYATYYAASVKGRFTISRDDSKNTAYLQMDSLKTEDTAVYYCVGGGDFWGQGTLVTVSS

SEQ ID NO: 1937 - protein, 115 aa, Synthetic construct
LVQLVESGGGLVQPGGSLKLSCAASGFTFNTYAMHWVRQASGKGLEWVGRIRSKSNNYATAYADSVKGRFTISRDDSKNTAYLQMDSLKTEDTAVYYCVGGGDFWGQGTLVTVSS

SEQ ID NO: 1938 - protein, 115 aa, Synthetic construct
LVQLVESGGGLVQPGGSLKLSCAASGFTFNTYAMHWVRQASGKGLEWVGRIRSKSNNYATAYAASVKGRFTISRDDSKSTAYLQMDSLKTEDTAVYYCVGGGDFWGQGTLVTVSS

SEQ ID NO: 1939 - protein, 115 aa, Synthetic construct
LVQLVESGGGLVQPGGSLKLSCAASGFTFNTYAMHWVRQASGKGLEWVGRIRSKSNNYATAYAASVKGRFTISRDDSKNMAYLQMDSLKTEDTAVYYCVGGGDFWGQGTLVTVSS

SEQ ID NO: 1940 - protein, 115 aa, Synthetic construct
LVQLVESGGGLVQPGGSLKLSCAASGFTFNTYAMHWVRQASGKGLEWVGRIRSKSNNYATAYAASVKGRFTISRDDSKNTVYLQMDSLKTEDTAVYYCVGGGDFWGQGTLVTVSS

SEQ ID NO: 1941 - protein, 115 aa, Synthetic construct
LVQVVESGGGLVQPGGSLKLSCAASGFTFNTYAMNWVRQASGKGLEWVGRIRSKSNNYATYYAASVKGRFTISRDDSKSMAYLQMDSLKTEDTAVYYCVGGGDFWGQGTLVTVSS

SEQ ID NO: 1942 - protein, 115 aa, Synthetic construct
LVQVVESGGGLVQPGGSLKLSCAASGFTFNTYAMNWVRQASGKGLEWVARIRSKSNNYATYYAASVKGRFTISRDDSKSMAYLQMDSLKTEDTAVYYCVGGGDFWGQGTLVTVSS

SEQ ID NO: 1943 - protein, 121 aa, Synthetic construct
QVQLVQSGGGLVKPGGSLRLSCAASGFTFGTYSMNWVRQAPGKGLEWVSSISSSSSYIYYADSVKGRFTISRDNAKNSLYLQMNSLRAEDTAVYYCARGLGGWTHDAFDIWGQGTTVTVSS

SEQ ID NO: 1944 - protein, 120 aa, Synthetic construct
EVQLVESGGGLVQPGGSLRLSCAASGFNIKDTYIHWVRQAPGKGLEWVARIYPTNGYTRYADSVKGRFTISADTSKNTAYLQMNSLRAEDTAVYYCSRWGGDGTYAMDYWGQGTLVTVSS

SEQ ID NO: 1945 - protein, 120 aa, Synthetic construct
  VARIANT 22: note = X can be any amino acid
  VARIANT 96: note = X can be any amino acid
EVQLVESGGGLVQPGGSLRLSXAASGFNIKDTYIHWVRQAPGKGLEWVARIYPTNGYTRYADSVKGRFTISADTSKNTAYLQMNSLRAEDTAVYYXSRWGGDGTYAMDYWGQGTLVTVSS

SEQ ID NO: 1946 - protein, 124 aa, Synthetic construct
EVQLVESGGGLVKPGGSLRLSCAASGFTFLTYSMNWVRQTPGKRLQWVSAISGSGGATYYADSVKGRFTISRDNSKNTLYLQMNTVTADDTAIYFCARERDDIFPMGLNAFDIWGQGAMVIVSS

SEQ ID NO: 1947 - protein, 123 aa, Synthetic construct
EVQLLESGGGLVQPGGSLRLSCAASGFTFSTYAMSWVRQAPGKGLEWVSAISGSGGSTYYADSVKGRFTISRDNSKNTLYLQMNSLRAEDTAVYYCAKHGGSPMLYYYGMDVWGQGTTVTVSS

SEQ ID NO: 1948 - protein, 134 aa, Synthetic construct
EVQLLESGGGLVQPGGSLRLSCAASGFTFSTYAMSWVRQAPGEGLEWVSDINVGGVTTYYADSVKGRFTISRDNSKNTLYLQMNSLRVEDTAMYYCVRRSGPDRNSSPADFWGQGSLVIVSSGSASAPTLFPLV

SEQ ID NO: 1949 - protein, 116 aa, Synthetic construct
QVQLQQPGAELVRPGASVKLSCKASGYTFTTYWMNWVKQRPGQGLEWIGMIDPSDSETHYNQMFKDKATLTVDTSSSTAYMQLSSLTSEDSAVYYCARGRSWFVYWGQGTLVTVSS

SEQ ID NO: 1950 - protein, 124 aa, Synthetic construct
QVQLVQSGSELKKPGASVKVSCKASGYTFSNYAMNWVRQAPGQGPEWMGWIDTNTGNPTYAQGFIGRFVFSLDTSVNTAYLLIGSLEAEDTAVYYCAREEHYDFSSGYFRPAYWGQGTLVTVSS

SEQ ID NO: 1951 - protein, 121 aa, Synthetic construct
EVQLVESGGGVVQPGRSLRLSCAASEFTFSTYAMHWVRQAPGKGLEWVALISYDGINKYYADSVKGRFAISRDNSKNTLYLQVNSLRADDTAVYYCVRPYSGSYTNWFDLWGQGTLVTVSS

SEQ ID NO: 1952 - protein, 123 aa, Synthetic construct
EVQLVESGGGLSQPGGSLRLSCAASGFTVRTYCMNWVRQAPGKGLEWVSLVCGDNIDYYPDSVKGRFSISRDDSKNTLLLHMDSLRVEDTAVYYCARATPPGGGTGWPYFDFWGQGTLVTVSS

SEQ ID NO: 1953 - protein, 121 aa, Synthetic construct
QVQLVQSGGGLVQPGGSLRLSCSASGFTFNTYAMHWVRQAPGKRLEYVSSITRDGAGKFYADSVKGRFTISRDNSKNTLYQQMSSLRPEDTAVYYCVREGQQWLGLYFDHWGQGALVTVSS

SEQ ID NO: 1954 - protein, 115 aa, Synthetic construct
EVQLLESGGGLVQPGGSLRLSCAASGFPFSTDAMNWVRQAPGEGLEWVSTISDSGRDTYYAASVRGRFTISRDNSKNTVYLQMNSLRVEDTAVYYCANTNFLDYWGQGTLVTVSS

SEQ ID NO: 1955 - protein, 115 aa, Synthetic construct
EVQLLESGGGLVQPGGSLRLSCAASGFPFSTDAMNWVRQAPGEGLEWVSTISDTGRDTYYAASVKGRFTISRDNSKNTVYLQMNSLRAEDTAVYYCANTNFLDYWGQGTLVTVSS

SEQ ID NO: 1956 - protein, 129 aa, Synthetic construct
EVQLVESGGGLVQPGASLRVSCAASGFTFSTYNMNWVRQAPGKGLEWVSYISSRSSTIYYADSVQGRFTISRDNAKNSLYLQMNSLRAEDTAVYYCARDIGHYYDSSGYFHYSFGMDVWGQGTTVTVSS

SEQ ID NO: 1957 - protein, 111 aa, Synthetic construct
EVQLVESGSELKKPGASVKVSCKASGYTFNRYAMNWVRQAPGQGLEWMGWINTNTGNPTYAQGFTGRFVFSLDTSVSTAYLQISSLKAEDTAVYYCARGRRGAFDIWGQGT

SEQ ID NO: 1958 - protein, 139 aa, Synthetic construct
MNFGFSLIFLVLVLKGVQCEVKLVESGGGLVNPGGSLKLSCAASAFTFSTYAMSWVRQTPEKRLEWVTSISSGGRTYYPDSVKGRFNISRDNARNILYLQMSTLRSEDTAMYYCARSYGNYVGYVMDYWGQGTSVTVSS

SEQ ID NO: 1959 - protein, 139 aa, Synthetic construct
MGWTLVFLFLLSVTAGVHSEVKLVESGGGLVNPGGSLKLSCAASAFTFSTYAMSWVRQTPEKRLEWVTSISSGGRTYYPDSVKGRFNISRDNARNILYLQMSTLRSEDTAMYYCARSYGNYVGYVMDYWGQGTSVTVSS

SEQ ID NO: 1960 - protein, 120 aa, Synthetic construct
EVQLVESGGGLVQPGGSLRLSCAASAFTFSTYAMSWVRQAPGKGLEWVSSISSGGRTYYPDSVKGRFTISRDNSKNTLYLQMNSLRAEDTAVYYCARSYGNYVGYVMDYWGQGTLVTVSS

SEQ ID NO: 1961 - protein, 139 aa, Synthetic construct
MGWTLVFLFLLSVTAGVHSQVKLLESGGGLVQPGGSLRLSCSASAFTFSTYAMSWVRQAPGKGLEYVSSISSGGRTYYPDSVKGRFTISRDNSKNTVYLQMSSLRAEDTAVYYCARSYGNYVGYVMDYWGQGTLVTVSS

SEQ ID NO: 1962 - protein, 138 aa, Synthetic construct
MGWTLVFLFLLSVTAGVHSVQLVESGGGLVQPGGSLRLSCAASAFTFSTYAMSWVRQAPEKGLEWVSSISSGGRTYYPDSVKGRFTISRDNSKNTLYLQMNSLRAEDTARYYCARSYGNYVGYVMDYWGQGTLVTVSS

SEQ ID NO: 1963 - protein, 120 aa, Synthetic construct
EVQLVESGGGLVQPGGSLRLSCAASAFTFSTYAMSWVRQAPGKGLEWVSSISSGGRTYYPDSVKGRFTISRDNSKNTLFLRMNSLRVEDTAVYFCARSYGNYVGYVMDYWGQGTLVTVSS

SEQ ID NO: 1964 - protein, 120 aa, Synthetic construct
EVQLLESGGGLVQPGGSLRLSCAASAFTFSTYAMSWVRQAPGKGLEWVSSISSGGRTYYPDSVKGRFTISRDNSKNTLYLQMNSLRAEDTAVYYCARSYGNYVGYVMDYWGQGTSVTVSS

SEQ ID NO: 1965 - protein, 119 aa, Synthetic construct
EVQLLESGGALVQPGGSLRLSCAASGFTFKTYAMSWVRQVPGKGLEWVSAISGSGTASYYADSVKGRFTLSRDNSKNTLYLQLSSLRDEDTGVYYCARRFLDWFGMDVWGLGTTVTVSS

SEQ ID NO: 1966 - protein, 112 aa, Synthetic construct
EVQLLESGGGLVQPGGSLRLSCAASGFTFSSYAMSWVRQAPGKGLEWVSTISSGGSYTSYPDSVKGRFTISRDNSKNTLYLQMNSLRAEDTAVYYCAKQDYAMNYWGQGTMV

SEQ ID NO: 1967 - protein, 116 aa, Synthetic construct
EVQLLESGGGLVQPGGSLRLSCAASGFTFSSYAMSWVRQAPGKGLEWVSTISSGGSYTSYPDSVKGRFTISRDNSKNTLYLQMNSLRAEDTAVYYCAKQDYAMNYWGQGTLVTVSS

SEQ ID NO: 1968 - protein, 127 aa, Synthetic construct
AVTLDESGGGLQTPGGALSLVCKASGFDFSSYAMNWVRQAPGKGLEWVAGIGSTGSSTGYGPAVKGRATISRDNGQSTLRLQLNNLRAEDTAIYYCAKSVGNGNSWSGYIATSIDAWGHGTEVIVSS

SEQ ID NO: 1969 - protein, 127 aa, Synthetic construct
EVQLLESGGGLVQPGGSLRLSCAASGFDFSSYAMNWVRQAPGKGLEWVAGIGSTGSSTGYADSVKGRFTISRDNSKNTLYLQMNSLRAEDTAVYYCAKSVGNGNSWSGYIATSIDAWGQGTLVTVSS

SEQ ID NO: 1970 - protein, 127 aa, Synthetic construct
EVQLLESGGGLVQPGGSLRLSCAASGFTFSSYAMNWVRQAPGKGLEWVAGISSSGRYTGYADSVKGRFTISRDNSKNTLYLQMNSLRAEDTAVYYCAKSVGSGVSWSGYVATSIDAWGQGTLVTVSS

SEQ ID NO: 1971 - protein, 127 aa, Synthetic construct
EVQLLESGGGLVQPGGSLRLSCAASGFTFSSYAMNWVRQAPGKGLEWVAGISSSGRYTGYADSVKGRFTISRDNSKNTLYLQMNSLRAEDTAVYYCAKSMGSGVSWSGYVATSIDAWGQGTLVTVSS

SEQ ID NO: 1972 - protein, 127 aa, Synthetic construct
EVQLLESGGGLVQPGGSLRLSCAASGFTFSSYAMNWVRQAPGKGLEWVAGISSSGRYTGYADSVKGRFTISRDNSKNTLYLQMNSLRAEDTAVYYCAKSMGSGVSWSGYVATSIDVWGQGTLVTVSS

SEQ ID NO: 1973 - protein, 127 aa, Synthetic construct
EVQLLESGGGLVQPGGSLRLSCAASGFTFSSYAMNWVRQAPGKGLEWVAGISSSGRYTGYADSVKGRFTISRDNSKNTLYLQMNSLRAEDTAVYYCAKSVGSGVSWSGYVATSLDAWGQGTLVTVSS

SEQ ID NO: 1974 - protein, 127 aa, Synthetic construct
EVQLLESGGGLVQPGGSLRLSCAASGFTFSSYAMNWVRQAPGKGLEWVAGISSSGRYTGYADSVKGRFTISRDNSKNTLYLQMNSLRAEDTAVYYCAKSMGSGVSWSGYVATSLDVWGQGTLVTVSS

SEQ ID NO: 1975 - protein, 127 aa, Synthetic construct
EVQLLESGGGLVQPGGSLRLSCAASGFTFSSYAMNWVRQAPGKGLEWVAGISSSGRYTGYADSVKGRFTISRDNSKNTLYLQMNSLRAEDTAVYYCAKSVGSGVSWSGYVATSLDVWGQGTLVTVSS

SEQ ID NO: 1976 - protein, 118 aa, Synthetic construct
QMQLVQSGAEVKKPGSSVKVSCKASGDTFTRYIINWVRQAPGQGLEWMGRVIPTLGLTTYAQNFQDTVTIIADKSTNTAYMELKNLRSEDTAVYYCARGYGSGAFDIWGQGTMITVSS

SEQ ID NO: 1977 - protein, 114 aa, Synthetic construct
QVQLVESGGGVVQPGRSLRLSCAASGFTFKTYAMHWVRQAPGKGLEWVAVISYDGQHKYYADSVKGRFTISRDNSKNTLYLQMNSLRAEDTAVYYCTTTTFDSWGQGTLVTVSS

SEQ ID NO: 1978 - protein, 114 aa, Synthetic construct
QVQLVESGGGVVQPGRSLRLSCAASGFTFRTYAMHWVRQAPGKGLEWVAVISYDGNDKYYADSVKGRFTISRDNSKNTLYLQMNSLRAEDTAVYYCVPTTFEYWGQGTLVTVSS

SEQ ID NO: 1979 - protein, 114 aa, Synthetic construct
QVQLVESGGGVVQPGRSLRLSCAASGFTFWTYAMHWVRQAPGKGLEWVAVISYDGNDKYYADSVKGRFTISRDNSKNTLYLQMNSLRAEDTAVYYCVPTTFEYWGQGTLVTVSS

SEQ ID NO: 1980 - protein, 116 aa, Synthetic construct
QLVQSGAEVKKPGSSVKVSCKASGYTFTSYHIHWVRQAPGQGLEWMGWIYPGNVNTEYNEKFKGKATITADKSTSTAYMELSSLRSEDTAVYYCAREEITYAMDYWGQGTTVTVSS

SEQ ID NO: 1981 - protein, 116 aa, Synthetic construct
QLVESGGGLVKPGGSLRLSCAASGYTFTSYHIHWVRQAPGKGLEWVGWIYPGNVNTEYNEKFKGRFTISRDDSKNTLYLQMNSLKTEDTAVYYCAREEITYAMDYWGQGTTVTVSS

SEQ ID NO: 1982 - protein, 116 aa, Synthetic construct
QLVQSGAEVKKPGSSVKVSCKASGYTFTSYHIHWVRQAPGQGLEWIGWIYPGNVNTEYNEKFKGKATITADESTNTAYMELSSLRSEDTAVYYCAREEITYAMDYWGQGTLVTVSS

SEQ ID NO: 1983 - protein, 116 aa, Synthetic construct
QLVQSGAEVKKPGSSVKVSCKASGYTFTSYHMHWVRQAPGQGLEWIGYIYPGNVNTEYNEKFKGKATLTADKSTNTAYMELSSLRSEDTAVYFCAREEITYAMDYWGQGTLVTVSS

SEQ ID NO: 1984 - protein, 118 aa, Synthetic construct
QVQLVQSGAEVKKPGSSVKVSCKASGYTFTSYHIHWVRQAPGQGLEWIGWIYPGNVNTEYNEKFKGKATITADESTNTAYMELSSLRSEDTAVYYCAREEITYAMDYWGQGTLVTVSS

SEQ ID NO: 1985 - protein, 118 aa, Synthetic construct
EVQLLESGGGLVQPGGSLRLSCAASGFTFSNYAMNWVRQAPGKGLEWVAHINQDGSEKYYVESVKGRFTISRDNSKNTLYLQMNSLRAEDTAVYYCGKLRGGAYNDYWGQGTLVTVSS

SEQ ID NO: 1986 - protein, 31 aa, Synthetic construct
EVQLVESGGGLIQPGGSLRLSCAASGFTVSS

SEQ ID NO: 1987 - protein, 86 aa, Synthetic construct
MDNDIRILIGLTDLNIDFDAKAEQHFNETNLNGTAPITWNLLLTYATNCEKFGTPMVHNGIKMVTHKGPRIAFKFQNYRIRKQKFL

SEQ ID NO: 1988 - protein, 134 aa, Synthetic construct
MMMPANYSVIAENEMTYVNGGANFIDAIGAVTAPIWTLDNVKTFNTNIVTLVGNTFLQSTINRTIVLFSGNTTWKEVGNIGKNLFGTNVKGNPIEKNNFGDYAMNALGIAAAVYNLGVAPTKNTVKETEVKFTV

SEQ ID NO: 1989 - protein, 118 aa, Synthetic construct
DVQLVESGGGVVRPGESLRLSCAASGFTFSTYAMSWVRQAPGKGLEWVSGISASGSGTYYGDSVKGRFTMSRDNSKNTLYLQMNSLTAEDTAVYYCARETWNHLFDYWGLGTLVTVSS

SEQ ID NO: 1990 - protein, 124 aa, Synthetic construct
EVQLVESGGDLVQPGGSLRLSCAASGVTFRTYEMNWVRQAPGKGLEWISHISSSGDIIYYTKSVKGRFTISRDNAKNSLFLQMTSLRAEDTAVYYCARERYSQYGYYYFGMDVWGQGTTVTVSS

SEQ ID NO: 1991 - protein, 121 aa, Synthetic construct
QVQLVESGGGLVQPGGSLRLSCAASGFTFSTYGMNWVRQAPGKGLEWISFISSSSSTVYYADSVKGRFTMSRDNAKNSLYLQMNSLRDEDTAVYYCARAHYDWNFDGMDVWGQGTTVTVSS

SEQ ID NO: 1992 - protein, 120 aa, Synthetic construct
LESGGGLVKPGGSLTLSCAASGFTFSTYAMHWVRQAPEKGLEWVSTIGRSGDTLYSDSVKGRFSISRDNSKNTLYLQMNSLRAEDTAVYYCARKGYCSSTNCQSQYYFDYWGQGTLVTVS

SEQ ID NO: 1993 - protein, 121 aa, Synthetic construct
EVKLVESGGGLVKSGGSLKLSCAVSGFTFSTYAMSWVRQIPEKRLEWVATISNGGSYIYYSDSVKGRFTISRDNAKNTLYLQMSSLRSEDTAMYYCARHRESYRYDWFAYWGQGTLVTVSA

SEQ ID NO: 1994 - protein, 117 aa, Synthetic construct
QVQLMESGPELKKPGETVKISCTTSGYTPTYAMHWVKQAPGKGLEWMGWINTATGEPTYAYDFKERFGFSLETSASTAFLQISNLKIEDTATYFCASDGRYWYFGVWGAGTTVTVSS

SEQ ID NO: 1995 - protein, 118 aa, Synthetic construct
QVQLVQSGAEVKKPGASVKVSCKASGYTFSGYSTHWLRQVPGQGLEWIGWDNPSSGDTTYAENFRGRVTLTRDTSITTDYLEVRGLRSDDTAVYYCARGGDDYSFDHWGQGTLVTVSS

SEQ ID NO: 1996 - protein, 118 aa, Synthetic construct
QVQLVQSGAEVKKPGSSVKVSCKASGYTFSGYSTHWLRQVPGQGLEWIGWDNPSSGDTTYAENFRGRVTLTRDTSITTDYLEVRGLRSDDTAVYYCARGGDDYSFDHWGQGTLVTVSS

SEQ ID NO: 1997 - protein, 120 aa, Synthetic construct
MAQVQLVQSGAEVKKPGASVKVSCKASGYTFSGYSTHWLRQVPGQGLEWIGWDNPSSGDTTYAENFRGRVTLTRDTSITTDYLEVRGLRSDDTAVYYCARGGDDYSFDHWGQGTLVTVSS

SEQ ID NO: 1998 - protein, 120 aa, Synthetic construct
MAQVQLVQSGAEVKKPGSSVKVSCKASGYTFSGYSTHWLRQVPGQGLEWIGWDNPSSGDTTYAENFRGRVTLTRDTSITTDYLEVRGLRSDDTAVYYCARGGDDYSFDHWGQGTLVTVSS

SEQ ID NO: 1999 - protein, 125 aa, Synthetic construct
EVQLLESGGGLVQPGGSLRLSCAASGFSFSTYAMSWVRQAPGKGLEWVSGISGSGESTYYADSVKGRFTVSRDNSKNTLYLQMNSLRAEDTAVYYCAKQGDHIAWLLRGINFDYWGQGVLVTVSS

SEQ ID NO: 2000 - protein, 115 aa, Synthetic construct
EVQLVESGGGLVQPGGSLRLSCAASGFTVSTYAMSWVRQTPEKRLEWVASMSSGGSLYYPDTVKGRFTISRDNSKNTVYLQMNSLRAEDTAMYYCVRGGYGTSYWGQGTLVTVSS

SEQ ID NO: 2001 - protein, 115 aa, Synthetic construct
EVQLVESGGGLVQPGGSLRLSCAASGFTVSTYAMSWVRQTPGKRLEWVASMSSGGSLYYPDTVKGRFTISRDTSKNTVYLQMNSLRAEDTAVYYCVRGGYGTSYWGQGTLVTVSS

SEQ ID NO: 2002 - protein, 115 aa, Synthetic construct
EVQLVESGGGLVQPGGSLRLSCAASGFTVSTYAMSWVRQTPEKRLEWVASMSSGGSLYYPDTVKGRFTISRDNSKNIVYLQMNSLRAEDTAVYYCVRGGYGTSYWGQGTLVTVSS

SEQ ID NO: 2003 - protein, 115 aa, Synthetic construct
EVQLLESGGGSVKPGGSLKLSCSASGFSLSTYAMSWVRQTPEKRLEWVASMSSGGSLYYPDTVKGRFTISRDTVKNIVYLQMSSLRSEDTAMYYCVRGGYGTSYWGQGTTVTVSS

SEQ ID NO: 2004 - protein, 124 aa, Synthetic construct
EENLLQSGGGLVQPGGSLRLSCAGSGFTFSTYAMTWVRQAPGQGLEWVSSISGSGEISYYADSVGLFTISRDNSKDTVFLQMTSLRAEDTAVYYCAKSDVWEGYRPSKDALHMWGQGTMVTVSS

SEQ ID NO: 2005 - protein, 110 aa, Synthetic construct
EVQLVESGGGLIQPGGSLRLSCAASGFTFSAYAMNWVRQAPGKGLEWVSAIGGSGGSTYYADSVKGRFTISRDNSKKILYLQMNGLRAEDTAIYYCAKGRDWTGGYFFDS

SEQ ID NO: 2006 - protein, 108 aa, Synthetic construct
QESGAELVRPGASVKLSCKDSGYTFTTYWMNWVKQRPEQGLEWIGRIDPYDSETHYNQKFKDKAILTVDKSSNTAYMQLSSLTSEDSAVYYCVRGGSTVAYFGVWGQG

SEQ ID NO: 2007 - protein, 116 aa, Synthetic construct
  VARIANT 2: note = X can be any amino acid
RXGGGLVQPGGSLRLSCAASRFTFSRYAMNWVRQAPGKGLEWVSSITGSGGRTFYADSVKGRFTISRDNSKNTLYLQMNSLRAEDTALYYCAKPPTVTTGDPFDIWGQGTMVTVSS

SEQ ID NO: 2008 - protein, 125 aa, Synthetic construct
QVQLVESGGGVVQPGRSLRLSCAASEITFITYAMHWVRQAPGKGLEWVALISDDGSNKFYADSVKGRFTISRDNSKNTLYLQMNSLRAEDTAAYYCAREGVYFDSGTYRGYFDYWGQETLVTVSS

SEQ ID NO: 2009 - protein, 112 aa, Synthetic construct
EVQLVESGGGLVQPGGSLRLSCAASGFTVSTYAMSWVRQTPEKRLEWVASMSSGGSLYYPDTVKGRFTISRDNSKNTVYLQMNSLRAEDTAMYYCVRGGYGTSYWGQGTLVT

SEQ ID NO: 2010 - protein, 127 aa, Synthetic construct
EVQLLESGGGLVQPGGSLRLSCVASGFTFSTYAMTWVRQAPGKGLEWVSVIRASGDSEIYADSVRGRFTISRDNSKNTVFLQMDSLRVEDTAVYFCANIGQRRYCSGDHCYGHFDYWGQGTLVTVSS

SEQ ID NO: 2011 - protein, 123 aa, Synthetic construct
QVQLVQSGAEVKKPGASVKVSCKASANIFTYAMHWVRQAPGQRLEWMGWINVGNGQTKYSQRFQGRVTITRDTSATTAYMELSTLRSEDTAVYYCARRASQYGEVYGNYFDYWGQGTLVTVSS

SEQ ID NO: 2012 - protein, 131 aa, Synthetic construct
EVQLLESGGGLVQPGGPLRLSCVASGFSFSSYAMNWIRLAPGKGLEWVSGISGSGGSTYYGDSVKGRFTISRDNSKNTLYLQMNSLRAEDTAVYYCAKEPWIDIVVASVISPYYYDGMDVWGQGTTVTVSS

SEQ ID NO: 2013 - protein, 120 aa, Synthetic construct
EVQLLEQSGGGVVQPGRSLRLSCAASGFTFSTYAMHWVRQAPGKGLEWVAVISHDGSNKFYADSVKGRFTISRDSSKNTLYLQMNSLRPGDTAVYYCSRWDRRAEYFQDWGQGTLVTVSS

SEQ ID NO: 2014 - protein, 127 aa, Synthetic construct
EVQLLESGGGVVQPGRSLRLSCAASGFTLSTYAMHWVRQAPGRGLEWVAVISYDGDHKFYADSMKGRFAISRDTSTNTLYLEVNSLKIEDTAVYYCARDRDRRGGYVFSTTGGLDSWGQGTLVTVSS

SEQ ID NO: 2015 - protein, 104 aa, Synthetic construct
AELVRPGGSVKLSCKASGYSFTTYWMNWVKQRPGQGLEWIGMIQPSDSETRLNQKFKDKATLTLDRSSSTVYMQLSSPTSDDSAVYYCARTGRGDAWLTYWGQG

SEQ ID NO: 2016 - protein, 119 aa, Synthetic construct
EVQLLEQSGPSLVKPSQTLSLTCSVTGDSITSGYWNWIRKFPGNKLEYMGYISYSGSTYYNLSLRSRISITRDTSKNQYYLQLNSVTTEDTATYYCALITTTTYAMDYWGQGTTVTVSS

SEQ ID NO: 2017 - protein, 118 aa, Synthetic construct
EVQLQESGPGLVKPSETLSLTCTVSGDSITSGYWNWIRQPPGRALEWMGYISYSGSTYYSLSLRSRITISRDTSKNQYSLRLSSVTAADTAMYYCALITTSTYAMDYWGQGTTVTVSS

SEQ ID NO: 2018 - protein, 120 aa, Synthetic construct
LESGGGLVQPGGSLRLSCAASGFTFSGYAMNWVRQAPGKGLEWVSAISGNGFSTYYADSVKGRFTISRDNARNTLYLQMNSLRAEDTAVYYCAKVLLVATHYYYNGMDVWGQGTTVTVSS

SEQ ID NO: 2019 - protein, 124 aa, Synthetic construct
QVQLVESGGGVVQPGGSLRLSCAASGFTFSTAGMHWVRQAPGKGLEWVAVIWYNGKEISYADSVKGRFTVSRDNPKNTLYLQMSSLRTEDTAVYYCARNRGDIYYDFTYAMDIWGQGTMVTVSS

SEQ ID NO: 2020 - protein, 124 aa, Synthetic construct
QVQLVESGGGVVQPGRSLRLSCTASGFSFSSYGMHWVRQAPGKGLEWVAVIWYNGKEISYADSVKGRFTVSRDNPKNTLYLQMSSLRTEDTAVYYCARNRGDIYYDFTYAMDIWGQGTMVTVSS

SEQ ID NO: 2021 - protein, 124 aa, Synthetic construct
QVQLVESGGGLVQPGRSLRLSCVGSGFTFSSYGIHWVRQAPGKGLEWVAVIWYNGKEISYADSVKGRFTVSRDNLKNTLYLQMSSLRTEDTAVYYCARNRGDIYYDFTYAMDIWGQGTMVTVSS

SEQ ID NO: 2022 - protein, 124 aa, Synthetic construct
QVQLVESGGGLVQPGRSLRLSCVGSGFTFSSYGIHWVRQAPGKGLEWVAVIWYNGKEISYADSVKGRFTVSRDNPKNTLYLQMSSLRTEDTAVYYCARNRGDIYYDFTYAMDIWGQGTMVTVSS

SEQ ID NO: 2023 - protein, 124 aa, Synthetic construct
EVQLVESGGGVVQPGGSLRLSCAASGFTFSTAGMHWVRQAPGKGLEWVAVIWYNGKEISYADSVKGRFTVFRDNPKNTLYLQMSSLRTEDTAVYYCARNRGDIYYDFTYAMDIWGQGTMVTVSS

SEQ ID NO: 2024 - protein, 124 aa, Synthetic construct
EVQLVESGGGLVQPGRSLRLSCVGSGFTFSSYGIHWVRQAPGKGLEWVANIWYDGSSESYIDSVKGRFTVSRDDSRNTVYLQMNSLRPEDTAVYYCARNRGDIYYDFTYAMDIWGQGTMVTVSS

SEQ ID NO: 2025 - protein, 124 aa, Synthetic construct
EVQLVESGGGVVQPGRSLRLSCAASGFTFSSYGMHWVRQAPGKGLEWVAVIWYDGYNKDYADSVKGRFTISRDNSKNTLYLQINSLRAEDTAVYYCARNRGDIYYDFTYAMDIWGQGTMVTVSS

SEQ ID NO: 2026 - protein, 124 aa, Synthetic construct
EVQLVESGGGVVQPGRSLRLSCAASGFTFSNYPMHWVRQAPGKGLEWVAVISYDGSEKWYADSVKGRFTISRDNSKNTLYLEMNSLRPEDTAVYYCARNRGDIYYDFTYAMDQWGQGTTVTVSS

SEQ ID NO: 2027 - protein, 124 aa, Synthetic construct
EVQLVESGGGVVQPGRSLRLSCAASGFTFSSYPLHWVRQAPGKGLEWVSFISYDGSEKYYASSVKGRFTISRDNSENTLYLQMNSLRPEDTAVYYCARNRGDIYYDFTYAMDIWGQGTMVTVSS

SEQ ID NO: 2028 - protein, 123 aa, Synthetic construct
QVQLVESGGGVVQPGRSLRLSCAGSGFIFSSYAMNWVRQTPVKGLEWVAVISYDGSNKYYADSVKGRFTISRDNSKNTLYLQMNSLGGEDTAVYFCARGRVHSSSWPTPSDLWGQGTLVTVSS

SEQ ID NO: 2029 - protein, 127 aa, Synthetic construct
EVQLVESGGGLVQAGGSLRLSCAASGRTFGTYAMAWFRQAAGKEREFVGAISSWGGGRTYYPPSVQGRFTISRENAKNTVYLQLSSLKPEDTAVYYCAAKRDNCSAFGCYAGPYDYWGQGTQVTVSS

SEQ ID NO: 2030 - protein, 119 aa, Synthetic construct
EVQLVESGGGLVQPGGSLRLSCAASGFTFSTYAMSWVRQAPGKGLEWVSSINNSGRNTFSADSVKGRFTISRDNSKNTLFLVMNSLRAEDTAVYYCAKDLRLGGGSDYWGQGTLVTVSS

SEQ ID NO: 2031 - protein, 124 aa, Synthetic construct
EVQLQESGGGLVQPGGSLRLSCAASGFTFSTYSMNWVRQAPGKGLEWISYITSSSSAIYYADSVKGRFTISRDNAKNSLYLQMNSLRAEDTAVYYCARDLMGGIFGYSYGVDVWGQGTTVTVSS

SEQ ID NO: 2032 - protein, 128 aa, Synthetic construct
EVQLVESGGGLVNPGGSLRLSCAASGFTFSNYAMNWVRQAPGKGLEWVSSISRSGDYIYYADSLKGRSTISRDNAKNSLFLQMNSLRAEDSAVYYCARDWGRLGYCSSNNCPDAFDVWGQGTRVSVSS

SEQ ID NO: 2033 - protein, 125 aa, Synthetic construct
QVQLVQSGGGLVQPGGSLRLSCVGSGFTFSTYSMNWVRQAPGKGLEWVSHISSSSVTMYYADFVKGRFTISRDNAKNSLYLQMTSLRAEDTAVYYCARDAGPVWSGYYDYGMDVWGQGTTVTVSS

SEQ ID NO: 2034 - protein, 127 aa, Synthetic construct
QVQLVQSGGGLVRPGGSLRLSCAASGFMFSTYSMNWLRTVPGKGLEWVSSISGSSSHIYYADSVKGRFTISRDNTKNSLYLQMNSLRPEDTALYYCARYFGDYSGLGNYYYYGMDVWGQGTTVTVSS

SEQ ID NO: 2035 - protein, 122 aa, Synthetic construct
QVQLVESGGGVVQPGRSLRLSCAASGFTFSSYAMNWIRQPPGKGLEWIGYIYTSGTTYHANWARGRFTISRDNSKNTLYLQMNSLRAEDTAVYYCARGTFIWDYYYWVMDLWGPGTLVTVSS

SEQ ID NO: 2036 - protein, 122 aa, Synthetic construct
QVQLVESGGGVVQPGRSLRLSCAASGFTFSSYAMNWIRQPPGKGLEWIGYIYTSGTRYRANWARGRFTISRDNSKNTLYLQMNSLRAEDTAVYYCARGTDIYDYYYWVMDLWGPGTLVTVSS

SEQ ID NO: 2037 - protein, 119 aa, Synthetic construct
EVQLLESGGGLVQPGGSLRLSCAASGFTFSTYAMSWVRQAPGKGLEWVAVVSIDGGTTYYGDPVKGRFTISRDNSKNTLYLQMNSLRAEDTAVYYCTRGPTLTYYFDYWGQGTLVTVSS

SEQ ID NO: 2038 - protein, 117 aa, Synthetic construct
EVQLLESGGGLVQPGGSLRLSCAASGFTFSSYAMNWVRQAPGKGLEWVGLISYDGRTTYYADSVKGRSTISRDNSKNTLYLQMNSLRAEDTAVYYCATTTGTTLDYWGQGTLVTVSS

SEQ ID NO: 2039 - protein, 126 aa, Synthetic construct
EVQLLESGGGLVQPGGSLRLSCAASGFTFSSYAMNWVRQAPGKGLEWVANINQDGSTKFYVDSVKGRFTISRDNSKNTLYLQMNSLRAEDTAVYYCARDTGGNYLGGYYYYGMDVWGQGTLVTVSS

SEQ ID NO: 2040 - protein, 115 aa, Synthetic construct
EVQLLESGGGLVQPGGSLRLSCAASGFTFNNYAMNWVRQAPGKGLEWVSGIGYYGSYTSYADSVKGRFTISRDNSKNTLYLQMNSLRAEDTAVYYCARDYSFDYWGQGTLVTVSS

SEQ ID NO: 2041 - protein, 108 aa, Synthetic construct
QSVLTQDPAVSVALGQTVKITCQGDSLRSYLASWYQQKPGQAPTLVTYARNDRPAGVPDRFSGSKSGTSASLAISGLQSEDEADYYCAAWDDSLNGYLFGAGTKLTVL

SEQ ID NO: 2042 - protein, 123 aa, Synthetic construct
QVQLVESGGGLVQPGGSLRLSCAASGFTFSNYAMNWVRQAPGKGLEWVSAIHDNGHTYYPDSVKGRFTISRDNSKNTLYLQMNSLRAEDTAVYYCAREGEFGFMYSTLVFDSWGQGTLVTVSS

SEQ ID NO: 2043 - protein, 100 aa, Synthetic construct
MAEILKDFYAMNLFIFLIILPAKIRGETLSLTHPKCHHIMLPSLFITEVFQRVTDDGCPKPVNHLRVVKCIEHICEYGYNYRPDFASQIPESTKMPRKRE

SEQ ID NO: 2044 - protein, 78 aa, Synthetic construct
MVEILKNFYAMNLFIFLIILAVKIRGAHFPCVTDDDCPKPVNKLRVIKCIDHICQYARNLPDFASEISESTKMPCKGE

SEQ ID NO: 2045 - protein, 117 aa, Synthetic construct
QIQLVQSGSELKKPGASVKVSCKASGYTFTHYAMNWVRQAPGQGLEWMGWINTNTGEPTYAQGFTGRFVFSLDTSVSTAYLQISSLKAEDTAVYYCAREREPGMDSWGQGTLVTVSS

SEQ ID NO: 2046 - protein, 117 aa, Synthetic construct
QIQLVQSGSELKKPGASVKVSCKASGYTFTHYAMNWVRQAPGQGLEWMGWINTNTGEPTYAQGFTGRFVFSLDTSVSTAYLQISSLKAEDTAVYYCAREREPGMDTWGQGTLVTVSS

SEQ ID NO: 2047 - protein, 117 aa, Synthetic construct
QIQLVQSGSELKKPGASVKVSCKASGYTFTHYAMNWVRQAPGQGLEWMGWINTNTGEPTYAQGFTGRFVFSLDTSVSTAYLQISSLKAEDTAVYYCAREREPGMESWGQGTLVTVSS

SEQ ID NO: 2048 - protein, 117 aa, Synthetic construct
QIQLVQSGSELKKPGASVKVSCKASGYTFTHYAMNWVRQAPGQGLEWMGWINTNTGEPTYAQGFTGRFVFSLDTSVSTAYLQISSLKAEDTAVYYCAREREPGMDHWGQGTLVTVSS

SEQ ID NO: 2049 - protein, 117 aa, Synthetic construct
QIQLVQSGSELKKPGASVKVSCKASGYTFTHYAMNWVRQAPGQGLEWMGWINTNTGEPTYAQGFTGRFVFSLDTSVSTAYLQISSLKAEDTAVYYCAREREPGMDAWGQGTLVTVSS

SEQ ID NO: 2050 - protein, 117 aa, Synthetic construct
QIQLVQSGSELKKPGASVKVSCKASGYTFTHYAMNWVRQAPGQGLEWMGWINTNTGEPTYAQGFTGRFVFSLDTSVSTAYLQISSLKAEDTAVYYCAREREPGMDYWGQGTLVTVSS

SEQ ID NO: 2051 - protein, 117 aa, Synthetic construct
QIQLVQSGSELKKPGASVKVSCKASGYTFTHYAMNWVRQAPGQGLEWMGWINTNTGEPTYAQGFTGRFVFSLDTSVSTAYLQISSLKAEDTAVYYCAREREPGMDNWGQGTLVTVSS

SEQ ID NO: 2052 - protein, 117 aa, Synthetic construct
QIQLVQSGSELKKPGASVKVSCKASGYTFTHYAMNWVRQAPGQGLEWMGWINTNTGEPTYAQGFTGRFVFSLDTSVSTAYLQISSLKAEDTAVYYCAREREPGMDEWGQGTLVTVSS

SEQ ID NO: 2053 - protein, 116 aa, Synthetic construct
QSVEESGGRLVTPGTPLTLTCTVSGFSLTTYAMTWVRQAPGKGLEWIGIISNSGATAYASWAKGRFTISKTSTTVDLKITTPTTEDTATYFCARGRSGGWDALDPWGPGTLVTVSS

SEQ ID NO: 2054 - protein, 116 aa, Synthetic construct
QSVEESGGRLVTPGTPLTLTCKASGFSLSTYAMSWVRQAPGKGLEYIGIIDASVTTYYASWAKGRFTISKTSTTVDLTITSPTTEDTATYFCARSSSTYAYGFDPWGPGTLVTVSS

SEQ ID NO: 2055 - protein, 123 aa, Synthetic construct
HVQLQQSGPELVRPGASVKLSCKASGYIFITYWMNWVKQRPGQGLEWVGQIFPASGTTYYNELFEGKATLTVDTSSNTAYMHLTSLTSEDSAVYYCARTDFYRYDGGYALDYWGQGTSLTVSS

SEQ ID NO: 2056 - protein, 123 aa, Synthetic construct
QVQLVQSGAEVKKPGASVKVSCKASGYIFITYWMNWVRQAPGQGLEWMGQIFPASGTTYYAQKFQGRVTMTRDTSTSTVYMELSSLRSEDTAVYYCARTDFYRYDGGYALDYWGQGTLVTVSS

SEQ ID NO: 2057 - protein, 123 aa, Synthetic construct
QVQLVQSGAEVKKPGASVKVSCKASGYIFITYWMNWVRQAPGQGLEWVGQIFPASGTTYYAQKFQGRVTMTVDTSTSTVYMELSSLRSEDTAVYYCARTDFYRYDGGYALDYWGQGTLVTVSS

SEQ ID NO: 2058 - protein, 123 aa, Synthetic construct
QVQLVQSGAEVKKPGASVKLSCKASGYIFITYWMNWVRQAPGQGLEWVGQIFPASGTTYYAQKFQGRATLTVDTSTSTAYMELSSLRSEDTAVYYCARTDFYRYDGGYALDYWGQGTLLTVSS

SEQ ID NO: 2059 - protein, 123 aa, Synthetic construct
EVQLVQSGAEVKKPGASVKVSCKASGYIFITYWMNWVRQAPGQGLEWVGQIFPASGTTYYAQKFQGRVTMTVDTSTSTVYMELSSLRSEDTAVYYCARTDFYRYEGGYALDYWGQGTLVTVSS

SEQ ID NO: 2060 - protein, 105 aa, Synthetic construct
MALPKAKDVVAANPVVVFSKSYCPFCVQVKQLLADLGATFKAIELDQEKDGEEVQAALAEWTGQRTVPNVFIGGNHIGGCDKTTAMNGDGKLVPLLTQAGAVKAS

SEQ ID NO: 2061 - protein, 132 aa, Synthetic construct
METGLRWLLLVAVLKGVQCQSVEESGGRLVTPGTPLALTCTVSGFSLNYYAMNWVRQAPVKGLEWIGVITSDTTYYASWAKGRFTISKTSTTVELQITSPTTEDTATYFCASGGSTTSPALWGQGTLVTVSS

SEQ ID NO: 2062 - protein, 119 aa, Synthetic construct
QVQLVQSGSELKKPGASVKVSCKASGYTFTTYVMNWVRQAPGQGLEWMGWINTNTGNPTYAQGFTGRFVFSLDTSVSTASLQISSLKAEDTAVYYCSCEITTLGGMDVWGQGTTVTVSS

SEQ ID NO: 2063 - protein, 126 aa, Synthetic construct
QVQLVQSGSELKKPGASVKVSCKASGYTFTTYAMNWVRQAPGQGLEWMGWINTNTGTPTYAQGFTGRFVFSLDTSVSTAYLQISSLKADDTAVYYCARDLYSSSQENYYNYYMDVWGKGTTVTVSS

SEQ ID NO: 2064 - protein, 115 aa, Synthetic construct
EVQLLESGGGLVQPGGSLRLSCAASGFTFSTYAMSWVRQAPGKGLEWVSAISGSGGSTYYADSVKGRFTISRDNSKNTLYLQMNSLRAEDTAVYYCASGYSPDYWGQGTLVTVSS

SEQ ID NO: 2065 - protein, 125 aa, Synthetic construct
QVQLVQSGSELKKPGASVKVSCKASGYTFTSYAMNWVRQAPGQGLEWMGWINTNTGNPTYAQGFTGRFVFSLDTSVSTAYLQISSLKAEDTAVYYCARDHELPNTSSWFGHFEYWGQGTLVTVSS

SEQ ID NO: 2066 - protein, 124 aa, Synthetic construct
EVQLVESGGGLVKPGGSLRLSCATSGFTFRTYSMNWVRQAPGKGLEWVSSITTSRNYIYYADSVRGRFTISGDNANNSLYLQMNSLRAEDTAVYYCARVRFVRDTRKPYYFDFWGQGTLVTVSS

SEQ ID NO: 2067 - protein, 122 aa, Synthetic construct
QVQLVESGGGVVQPGRSLRLSCAASGFTFSTYAMHWVRQAPGKGLEWVAVISYDGSNKYYADSVKGRFTISRDNSKNTLYLQMNSLRAEDTAVYYCARGYGSGSYYPLYLYWGQGTLVTVSS

SEQ ID NO: 2068 - protein, 123 aa, Synthetic construct
QVQLVQSGSELKKPGASVKVSCKASGYTFTSYAMNWVRQAPGQGLEWMGWINTNTGNPTYAQGFTGRFVFSLDTSVSTTYLQISSLKAEDTAVYYCARVIGVVTYYYYGMDVWGQGTTVTVSS

SEQ ID NO: 2069 - protein, 121 aa, Synthetic construct
QVQLVESGGGVVQPGRSLRLSCAASEFTFATYAMHWVRQAPGKGLEWVALISQDGSNKHYADSVKGRFTISRDNSKNTLYLQMNSLRAEGTAIYYCARESLEAAGPPFDYWGQGTLVTVSS

SEQ ID NO: 2070 - protein, 125 aa, Synthetic construct
QVQLVQSGSELKKPGASVKVSCKASGYTFTSYAMNWVRQAPGQGLEWMGWINTNTGNPTYAQGFTGRFVFSLDTSVSTAYLQISSLKAEDTGVYYCARDHELPNSSSWFGHFEYWGQGTLVTVSS

SEQ ID NO: 2071 - protein, 121 aa, Synthetic construct
QVQLVQSGAEVKKPGASVKVSCKASGYTFTSYYVHWVRQAPGQSLEWMGVISPSTGSTTYAQNFQGRVTMTRDTSTTTVYMELSSLRSEDTAVYYCARDDYYDSTRYFDLWGRGTLVTVSS

SEQ ID NO: 2072 - protein, 125 aa, Synthetic construct
QVQLVQSGSELKKPGASVKVSCKASGYTFTSYAMNWVRQAPGQGLEWMGWINTNTGNPTYAQGFTGRFVFSLDTSVSTAYLQISVLKAEDTGVYYCARDHELPNSSSWFGHFEYWGQGTLVTVSS

SEQ ID NO: 2073 - protein, 121 aa, Synthetic construct
QVQLVESGGGVVQPGRSLRLSCAASGFTFATYAMHWVRQAPGKGLEWVALISHDGSNKHYADSVKGRFTISRDNSKKTLYLQMNSLRAEGTAIYYCARESLEAAAPPFDYWGQGTLVTVSS

SEQ ID NO: 2074 - protein, 124 aa, Synthetic construct
EVQLLESGGGLVQPGGSLRLSCAASGFTFSSYAMNWVRQAPGKGLEWVSIIYSGYNGTYYTDSVKGRFTISRDNSKNTLYLQMNSLRAEDTAVYYCAKPKPVGDDYGDPYFDYWGQGTLVTVSS

SEQ ID NO: 2075 - protein, 119 aa, Synthetic construct
EVHLLESGGAFVQPGGSLRLSCAASGFTFGDYAMNWVRQTPGKGLEWVSVISGRGISIYYASSVKGRFTISRDDFENTLYLQMNSLRVEDTALYYCAKGSYGDNVPDHWGQGTLVAVSP

SEQ ID NO: 2076 - protein, 122 aa, Synthetic construct
QVQLVESGGGVVQPGRSLRLSCAASGFTFSTYAMHWVRQAPGKGLEWLAITSYDGSNKYYADSVKGRFIISRDNSKSTLYLQMNSLRPEDTAVYYCARDLTRWELHYFFHYWGQGTLVTVSS

SEQ ID NO: 2077 - protein, 128 aa, Synthetic construct
QVQLVQSGSELKKPGASVKVSCKASGYTFTSYAMNWVRQAPGQGLEWMGWINTNTGNPTYAQGFTGRFVFSLDTSVSTAYLQISSLKAEDTAVYYCARALVVPAAMLVDYYYYGMDVWGQGTTVTVSS

SEQ ID NO: 2078 - protein, 125 aa, Synthetic construct
QVQLVESGGGVVQPGRSLRLSCAASGFIFRTYAMHWVRQAPGKGLEWVASISYDGEIKYYGDSVKGRFTISRDNSKDTLYLEMNSLRPEDTAIYYCPKDAPGTYYHRGFNWFDPWGQGTLVTVSS

SEQ ID NO: 2079 - protein, 121 aa, Synthetic construct
QVQLVESGGGVVQPGRSLRLSCAASGFTFATYAMHWVRQAPGKGLEWVAVISHDGSNKHYADSVKGRFTISRDNSKNTLYLQMNSLRAEGTAIYYCARESLEAAAPPFDYWGQGTLVTVSS

SEQ ID NO: 2080 - protein, 121 aa, Synthetic construct
QVQLVESGGGVVQPGRSLRLSCAASGFTFATYAMHWVRQAPGKGLEWVALISHDGSNKHYADSVKGRFTISRDNSKNTLYLQMNSLRAEGTAIYYCARESLEAAAPPFDYWGQGTLVTVSS

SEQ ID NO: 2081 - protein, 134 aa, Synthetic construct
QVQLVQSGSELKKPGASVKVSCKASGYTFTSYAMNWVRQAPGQGLEWMGWINTNTGNPTYAQGFTGRFVFSLDTSVSTAYLQISSLKAEDTAVYYCARNREGIYDFWSGYHRLSYYYYYGMDVWGQGTTVTVSS

SEQ ID NO: 2082 - protein, 119 aa, Synthetic construct
QVQLVQSGSELKKPGASVKVSCKASGYTFTTYAMNWVRQAPGQGLEWMGWINTNTGNPTYAQGFTGRFVFSLDTSVSTAYLQISSLKAEDTAVYYCAREVDSSGFFPPWGQGTLVTVSS

SEQ ID NO: 2083 - protein, 121 aa, Synthetic construct
QVQLVESGGGVVQPGRSLRLSCAASGFTFSTYAMHWVRQAPGKGLEWVAVISYDGTNKYYADSVKGRFTISRDNSKNTLYLQMNSLRAEDTAVYYCARTYGGNYLGYFDYWGQGTLVTVSS

SEQ ID NO: 2084 - protein, 122 aa, Synthetic construct
QVQLVQSGSELKKPGASVKVSCKASGYTFTTYAMNWVRQAPGQGLEWMGWINTNTGDPTYAQGFTGRFVFSLDTSVNTAYLQISSLKAEDTAVYYCARPNFSGWYSSAFDIWGQGTMVTVSS

SEQ ID NO: 2085 - protein, 121 aa, Synthetic construct
QVQLVESGGTVVQPGKSLRLSCAASGFIFSTYAINWVRQAPGKGLEWVAVISYDGNNKYYADSVKGRFTISRDNSKNTVFLQMNSLRAEDTAMYYCARPRGGGYRDAFDIWGQGTMVTVSS

SEQ ID NO: 2086 - protein, 119 aa, Synthetic construct
QVQLVESGGGVVQPGRSLRLSCAASGFTFSTYAMHWVRQAPGKGLEWVAVISYDGSNKYYADSVRGRFTISRDNSKNTLYLQMNSLRPEDTAVYYCARASSAYYYFDYWGQGTLVTVSS

SEQ ID NO: 2087 - protein, 125 aa, Synthetic construct
QVQLVQSGSELKKPGASVKVSCKTSGYTFTSYAMNWVRQAPGQGLEWMGWINTNTGNPTYAQGFTGRFVFSLDTSVSTAYLQISSLKAEDTALYYCAKTLPTRNLVARGDALDIWGQGTMVTVSS

SEQ ID NO: 2088 - protein, 122 aa, Synthetic construct
EVQVVESGGGLVKPGGSLRLSCAASGFTFNSYAMNWVRQAPGKGLEWVSSISSSGTYIYYADSVKGRFTISRDNAKNSLYLQMNSLRAEDTAVYYCSSATVVTGGILGFDYWGQGTLVTVSS

SEQ ID NO: 2089 - protein, 125 aa, Synthetic construct
QVQLVQSGSELKKPGASVKVSCKASGYSFTSYAMNWVRQAPGQGLEWMGWINTNTGNPTYAQGFTGRFVFSLDTSVSTAYLQITSLKAEDTAVYYCARDWEVPAPYYSYYYMDVWGKGTTVTVSS

SEQ ID NO: 2090 - protein, 118 aa, Synthetic construct
QVQLVQSGSELKKPGASVKVSCKASGYTFTNYAMNWVRQAPGQGLEWMGWIYTNTGNPTYAQGFTGRFVFSLDTSVSTAYLQISSLKAEDTAVYYCAREFVGWNFDYWGQGTLVTVSS

SEQ ID NO: 2091 - protein, 121 aa, Synthetic construct
QVQLVESGGGVVQPGRSLRLSCAASGFTFSTYAMHWVRQAPGKGLEWVAVISYDGSNKYYADSVKGRFTISRDNSKNTLYLQMNSLRAEDTAVYYCAKSGSGSYLSHFDYWGQGTLVTVSS

SEQ ID NO: 2092 - protein, 121 aa, Synthetic construct
QVQLVESGGGVVQPGRSLRLSCAASGFIFSTYAMHWVRQAPGKGLEWVAVISYDGFNKYYADSVKGRFTISRDNSKNTLYLQMNSLRAEDTAVFYCARARGGNYGSAFDIWGQGTMVTVSS

SEQ ID NO: 2093 - protein, 125 aa, Synthetic construct
QVQLVQSGSELKKPGASVKVSCKASGYTFTSYAMNWVRQAPGQGLEWMGWINTNTGNPTYAQGFTGRFVFSLDTSVSTAYLQISSLKAEDTAVYYCARDGEAPSGPYYYYYMDVWGKGTTVTVSS

SEQ ID NO: 2094 - protein, 123 aa, Synthetic construct
QVQLVQSGSDLKKPGASVKISCRASGYTLSNYAMNWVRQAPGHGLEWMGWINTNTGTPTYAQGFTGRFAFSLDTSVNTAYLQISSLQADDTAVYYCARDPGWQQLVENYFDFWGQGTLVTVSS

SEQ ID NO: 2095 - protein, 125 aa, Synthetic construct
QVQLVESGGGVVQPGRSLRLSCAASGFTFSTYAMHWVRQAPGKGLEWVAVISYDGSKKYYADSVKGRFTISRDHSRNTLYLQMNSLRAEDTAVYYCARESSGYTSGWFTGTMDVWGQGTTVTVSS

SEQ ID NO: 2096 - protein, 117 aa, Synthetic construct
EVQVVESGGGLVQPGGSLRLSCAASGFTFSTYAMHWVRQAPGKGLEYVSGISSNGGSTYYANSLKGRFTISRDNSKNTLYLQMGSLRAEDMAVYYCARSTNRGFDPWGQGTLVTVSS

SEQ ID NO: 2097 - protein, 121 aa, Synthetic construct
EVQLVESGGGLVQPGGSLRLSCAASGFTFSTYAMHWVRQAPGKGLEHVSGISSNGGSTYYANSVKGRFTISRDNSKNTLDLQMGSLRAEDMAVYYCARSLFLSGYVYFEYWGQGTLVTVSS

SEQ ID NO: 2098 - protein, 127 aa, Synthetic construct
EVQLVESGGGLVKPGGSLRLSCEASGFSFSTYSMNWVRQAPGKGLEWVSSTSSSSSHIYYADSVKGRFSISRDNAKNSLYLQMNSLRAEDTAVYYCARDYRRYSGSHSAPWHAFDIWGQGTMVTVSS

SEQ ID NO: 2099 - protein, 124 aa, Synthetic construct
EVQLLESGGRLVQPGGSLRLSCAASGFTFSSYAMNWVRQAPGKGLEWVSAISGSGGDTDYVDSVKGRFTISRDNSKNTLYLQMNSLRADDTAVYYCAKGHMGRLVGATWAFDYWGQGTLVTVSS

SEQ ID NO: 2100 - protein, 126 aa, Synthetic construct
EVQLVESGGGLVKPGGSLRLSCAASGFPFITYSMNWVRQAPGKGLEWVSSISRNSDYIYYADSVRGRVTISRDNAENSLYLQMHSLRAEDTAVYYCARDVVRSGNYYIPRHGMDVWGRGTTVTVSS

SEQ ID NO: 2101 - protein, 126 aa, Synthetic construct
QVQLVQSESELKKPGASVKVSCKASGYTFTTYAMNWVRQAPGQGLEWMGWINTNTGNPTYAQGFTGRFVFSLETSVSTAYLQINSLKAEDTAVYYCARDFDDNWNGDYSYYYMDVWGKGTTVTVSS

SEQ ID NO: 2102 - protein, 123 aa, Synthetic construct
QVQLVESGGGVVQPGRSLRLSCAASGFTFSTYAMHWVRQAPGKGLEWVAVISYDGSNKYYSDSVKGRFTISRDNSKNTLYLQMNSLRAEDTAVYYCARAHTSGWPLGDYFDYWGQGTLVTVSS

SEQ ID NO: 2103 - protein, 126 aa, Synthetic construct
QVQLVQSGSELKKPGASVKVSCKASGYTFTTYAMNWVRQAPGQGLEWMGWINTNTGEPTYAQGFTGRFVFSLDTSVSTAYLQISSLKAEDTAVYYCARDHDRNFQLEYNYYYMDVWGKGTTVTVSS

SEQ ID NO: 2104 - protein, 125 aa, Synthetic construct
EVQLLESGGGLVQPGGSLRLSCAASGFTFSSYAMNWVRQAPGKGLEWVSTISGSGGSTYYADSVKGRFTISRDNSKNTLYLQMNSLRADDTAVYYCAKGPMAYILVVVAAYFDYWGQGTLVTVSS

SEQ ID NO: 2105 - protein, 125 aa, Synthetic construct
EVQLLESGGGLVQPGGSLRLSCAASGFTFSTYAMSWVRQAPGKGLEWVSGISGSGGSTYYADSVKGRFTISRDNSKNTLYLQMNSLRAEDTAVYYCAKDTGILLWFGELSGVDYWGQGTLVTVSS

SEQ ID NO: 2106 - protein, 125 aa, Synthetic construct
QVQLVQSGSELKKPGASVKVSCKASGYTFTSYAMNWVRQAPGQGLEWMGWINTNTGNPTYAQDFTGRFVFSLDTSVSTAYLHISSLKAEDTAVYYCARDQDTKYPTYYYYYMDVWGKGTTVTVSS

SEQ ID NO: 2107 - protein, 125 aa, Synthetic construct
QVQLVQSGSELKKPGASVKVSCKASGYTFTTYAINWVRQAPGQGLEWMGWINTNTGNPTYAQDFTGRFVFSLDTSVSTAYLQISSLKTEDTAVYYCARDGMIVVPQYYYYYMDVWGKGTTVTVSS

SEQ ID NO: 2108 - protein, 116 aa, Synthetic construct
EVQLLESGGGLVQPGGSLRLSCAASGFTFSSYAMNWVRQAPGKGLDWVSGISGSGDITYYADSVKGRFTISRDNSKNTLYLQMNSLRAGDTAVYYCAKLDKAGMAWGQGTLVTASS

SEQ ID NO: 2109 - protein, 126 aa, Synthetic construct
QVQLVQSGSELKKPGASVKVSCKASGYTFTSYAMNWVRQAPGQGLEWMGWINTNTGNPTYAQGFTGRFVFSLDTSVSTAYLQISSLKADDTAVYYCARDHDLNFQLEYFYYYMDVWGKGTTVTVSS

SEQ ID NO: 2110 - protein, 131 aa, Synthetic construct
QVQLMESGGGVVQPGRSLRLSCAASGFTFNTYAMHWVRQAPGKGLEWVAVISNDGSDIYYADSVKGRFTISRDNSKNTLYLQMNSLRAEDTAVYYCARDRQYYDTLTDYYVPTSEYHFDYWGQGTLVTVSS

SEQ ID NO: 2111 - protein, 121 aa, Synthetic construct
QVQLVESGGGVVQPGRSLRLSCAASGFTFSTYAMHWVRQAPGKGLEWVAVISYDGSNKYYADSVKGRFTISRDNSKNTLYLQMNSLRAEDTAVYYCARSYSGNYNNAFHMWGQGTMLTVSS

SEQ ID NO: 2112 - protein, 123 aa, Synthetic construct
EVELVESGGGLVKPGKSLRLSCAASGFTFSTYAMNWVRQAPGKGLEWVSCITSNSDIYYADSVKGRFTISRDNAKNSLYLQMNSLRAEDTAVYYCARARRSYTTVRLYYFDYWGQGTLVTVSS

SEQ ID NO: 2113 - protein, 121 aa, Synthetic construct
QVQLVESGGGVVQPGRSLRLSCAASGFTFSTYAMHWVRQAPGKGLEWAAIISYDGINKYYADSVRGRFTISRDNSKNTLYLQMNSLRPEDTAVFYCARATSGSYYRSMDVWGQGTTVTVSS

SEQ ID NO: 2114 - protein, 121 aa, Synthetic construct
QVQLVESGGGVVQPGRSLRLSCAASGFTFSTYAMHWVRQAPGKGLEWVAVISYDGSNKYYADSVKGRFTISRDNSKNTLYLQMNSLRAEDTAVYYCARSLGGGYTYGSDYWGQGTLVTVSS

SEQ ID NO: 2115 - protein, 121 aa, Synthetic construct
QVHLVESGGGGVQPGRSLRLSCAASGFTFMTYAMHWVRQAPGKGLEWVAVISYDGNNRYYADSVRGRFTISRDNSKNTLYLQMNSLRAEDTAVYYCARSRGGSYSNAFDIWGQGTMVTVSS

SEQ ID NO: 2116 - protein, 121 aa, Synthetic construct
QVHLVESGGGVVQPGRSLRLSCAASGFTFSTYAMHWVRQAPGKGLEWVALISYDAGNKYYADSVKGRFTISRDNYKNTLDLQVNSLRPEDTAVYYCARGRGGSYFYGMDVWGQGTTVTVSS

SEQ ID NO: 2117 - protein, 128 aa, Synthetic construct
QVQLVQSGSELKKPGASVKVSCKASGYTFTNYAMNWVRQAPGQGLEWMGWINTNTGNPTYAQGFTGRFVFSLDTSVSTAYLQISSLKAEDTAMYYCASTAFLERSSYWQAMADYFDYWGQGTLVTVSS

SEQ ID NO: 2118 - protein, 120 aa, Synthetic construct
QVQLVESGGGVVQPGRSLRLSCAASGFTFSTYAMHWVRQAPGKGLEWVALISYDGINKYYADSVRGRFTFSRDNSKNTLYLQMNTLRPEDTAVYYCARGGSGTYYYFDQWGQGTLVTVSS

SEQ ID NO: 2119 - protein, 131 aa, Synthetic construct
ETQLLESGGGLGQPGGSLRLSCAASGFTFSTYAMSWVRQAPGKGLEWVSAISGSGGSIYYADSVKGRVTISRDNSKNTLYLQMDSLRAEDTAIYYCAKDQPHISMVQGAGERWWGYSFDYWGQGTLVTVSS

SEQ ID NO: 2120 - protein, 121 aa, Synthetic construct
QVQLVESGGGVVQPGRSLRLSCAASGFTFSTYAMHWVRQAPGKGLEWVAVISYDGINKYYADSVKGRFTISRDNSKNTLYLQMNSLRSEDTAVYYCARALGGGYYHGMDVWGQGTTVTVSS

SEQ ID NO: 2121 - protein, 123 aa, Synthetic construct
EVQLLESGGGLVQPGGSLRLSCAASGFTFSNYAMNWVRQAPGKGLEWVSAISGSGGGTYYADSVKGRFTIFRDNSKNTLYLQMISVRADDTAIYYCAQIPPPRMAAAAIVYYWGQGTLVTVSS

SEQ ID NO: 2122 - protein, 124 aa, Synthetic construct
EVQLVESGGGLVQPGGSLRLSCAASGFTFSTYSMNWVRQAPGKGLEWVSYISKSSSTKYDADSVKGRFTISRDDAKNTLYLQMDSLRDEDTAVYYCARHHGSGLSYYYYGLDVWGQGTTVTVSS

SEQ ID NO: 2123 - protein, 120 aa, Synthetic construct
QVQLVESGGGVVQPGRSLRLSCAASGFTFSTYAMHWFRQAPGKGLDWVAVISYDGSNKYYADSVKGRFTISRDNSKNTVYLQMNSLRAEDTAVYYCARDQGVMKYGMDVWGQGTTVTVSS

SEQ ID NO: 2124 - protein, 122 aa, Synthetic construct
EVQLLESGGGLVQPGGSLRLSCAASGFTFNSYAMNWVRQAPGKGLEWVSVLYSGGSSTYYADSVKGRFTISRDKSKNTLFLQMNSLRAEDTAVYYCANANLVAGQYNGMDVWGQGTTVTVSS

SEQ ID NO: 2125 - protein, 119 aa, Synthetic construct
QVQLVESGGGVVQPGKSLRLSCAASGFTFSTYAMHWVRQAPGKGLEWVAVISFDGSNKYYADSVKGRFTISRDNSKNTLYLQMSSLRTDDTALYYCARADWAWLLLNYWGQGTLVTVSS

SEQ ID NO: 2126 - protein, 121 aa, Synthetic construct
EVQLLESGGGLVQPGGSLRLSCAPSGFTFSSYAMNWVRQAPGKGLEWVSTISYTGGNTFYANSVKGRFTISRDNSKNTLYLQMNSLRVEDTAVYYCAKATTMVQGVDFDYWGQGTLVTVSS

SEQ ID NO: 2127 - protein, 118 aa, Synthetic construct
QVQLVQSGSELKKPGASVKVSCKASGYTFTTYAMNWVRQAPGQGLEWMGWINTNTGNPTYAQGFTGRFGFSLDTSANTAYLQISSLKAADTAVYYCGRLRGPGAFDIWGQGTMVTVSS

SEQ ID NO: 2128 - protein, 122 aa, Synthetic construct
EVQLLESGGGLVQPGGSRRLSCATSGFSFDTYAMSWLRQAPGKGLEWVSSFSGLDDSTYYADSVKGRFTISRDNSKNTLYLQMNSLRAEDTAIYYCAKDRGPRGIGELFDFWGQGTLVTVSS

SEQ ID NO: 2129 - protein, 127 aa, Synthetic construct
EVQLLESGGGLVQPGGSLRLSCEASGFTFSNYAMNWVRQAPGKGLEWVSTLGATDNSGDSTYYVESAKGRFTISRDNSKNTLYLQMNSLRVEDTAVYFCAKDRTGNIGAGTGYFDKWGQGTLVTVSS

SEQ ID NO: 2130 - protein, 122 aa, Synthetic construct
EVQLLESGGGLVQPGGSLRLSCATSGFTFSTYAMSWVRQAPGKGLEWVSSFSGVDDSTYYAESVKGRFTISRDNSKNTVYLQMTRLRAEDTAVYYCAKDRGPRGVGELFDSWGQGTLVTVSS

SEQ ID NO: 2131 - protein, 122 aa, Synthetic construct
EVQLLESGGGLVQPGGSLRLSCAASGFTFRTYAMSWVRQPPGKGLEWVSSISAREDSTYFAASVRGRFTISRDNSKNTLYLQMNNLRAEDTALYYCAKDRLQLGVGELYESWGQGTLVTVSS

SEQ ID NO: 2132 - protein, 124 aa, Synthetic construct
EVQLLESGGGLVQPGGSLRLSCAASGFTFTSYAMNWVRQAPGKGLEWVSGIGGRGAIAGDGSIYYADSVKGRFTISRDNSKNIVYLQMNGLRVEDTAVYYCAKDRVAFDGFHVWGQGTLVTVSS

SEQ ID NO: 2133 - protein, 122 aa, Synthetic construct
EVQLLESGGRLVQPGGSLTLSCAASGFPFSTYAMSWLRQAPGKGLEWVSGITGDSGSTYYAASVKGRFTISRDNSKNTLYLQMNSLTADDTAVYYCAKDRLHSGLGELFSYWGQGTLVTVSS

SEQ ID NO: 2134 - protein, 127 aa, Synthetic construct
EVQLLESGGGLVQPGGSLRLSCAASGFTFSTYAMSWVRQAPGKGLEWVSAISGSGRSTYYADSVKGRFTISRDNSKNTLYLQMNSLRGEDTAVYYCAKSSGGHNWNYVDYYYGMDVWGQGTTVTVSS

SEQ ID NO: 2135 - protein, 120 aa, Synthetic construct
EVQLLESGGGLVKPGGSLRLSCAASGLTFSTYAMSWVRQAPGKGLEWVSAISPGSGDNIYYGDSVKGRFTISRDNSKNTLYLQMNSLRAEDTAVYYCVNGGFSGYYSDYWGQGTLVTVSS

SEQ ID NO: 2136 - protein, 117 aa, Synthetic construct
GGGLVQPGGSLRLSCAASGFTFSSYAMNWVRQAPGKGLEWVSGIGGRGAIAGDGSIYYADSVKGRFTISRDNSKNTLYLQMNGLRVEDTAVYYCAKDRVAFDGFHVWGQGTTVTVSS

SEQ ID NO: 2137 - protein, 115 aa, Synthetic construct
GGGLVQPGGSRRLSCATSGFSFDTYAMSWLRQAPGKGLEWVSSFSGLDDSTYYADSVKGRFTISRDNSKNTLYLQMNSLRAEDTAIYYCAKDRGPRGIGELFDFWGQGTLVSVSS

SEQ ID NO: 2138 - protein, 115 aa, Synthetic construct
GGGLVQPGGSLRLSCATSGFTFSTYAMSWVRQAPGKGLEWVSSFSGVDDSTYYAESVKGRFTISRDNSKNTVYLQMTRLRAEDTAVYYCAKDRGPRGVGELFDSWGQGTLVTVSS

SEQ ID NO: 2139 - protein, 117 aa, Synthetic construct
GGGLVQPGGSLRLSCAASGFTFTSYAMNWVRQAPGKGLEWVSGIGGRGAIAGDGSIYYADSVKGRFTISRDNSKNIVYLQMNGLRVEDTAVYYCAKDRVAFDGFHVWGQGTTVTVSS

SEQ ID NO: 2140 - protein, 115 aa, Synthetic construct
GGGLVQPGGSLRLSCAASGFTFRTYAMSWVRQPPGKGLEWVSSISAREDSTYFAASVRGRFTISRDNSKNTLYLQMNNLRAEDTALYYCAKDRLQLGVGELYESWGQGTLVTVSS

SEQ ID NO: 2141 - protein, 115 aa, Synthetic construct
GGGLVQPGGSLRLSCAASGFTFRTYAMSWVRQAPGKGLEWVSSISASDDSTYFAASVRGRFTISRDNSKNTLYLQMNNLRAEDTALYYCAKDRLELGVGELYEFWGQGTLVTVSS

SEQ ID NO: 2142 - protein, 115 aa, Synthetic construct
GGRLVQPGGSLTLSCAASGFPFSTYAMSWLRQAPGKGLEWVSGITGDSGSTYYAASVKGRFTISRDNSKNTLYLQMNSLTADDTAVYYCAKDRLHSGLGELFSYWGQGTLVTVSS

SEQ ID NO: 2143 - protein, 115 aa, Synthetic construct
GGGLVQPGGSLRLSCAASGFTFRTYGMNWVRQAPGKGLEWVAGISSVDPSTYYAGSVKGRFTISRDNSKNMLYLQMNSLTADDSAVYYCAKDRMSGGFGELNESWGQGTRVTVSS

SEQ ID NO: 2144 - protein, 115 aa, Synthetic construct
GGGLVQPGGSLRLSCAASGFTFSTYAMSWVRQAPGKGLKWVSGITGDSGSTYYARSVKGRFTISRDNSKNTLYLEISSLRAEDTAFYFCTRDRLPNGIGELHDHWGQGTLVTVSS

SEQ ID NO: 2145 - protein, 115 aa, Synthetic construct
GGGLVQPGGSLRLSCAASGFTFRTYGMNWVRQAPGKGLEWVSGISGIDPSTYYADSVKGRFTISRDNSKNILFLQMNSLTADDTAVYYCTKDRLSGAFGELNESWGQGTMVIVSS

SEQ ID NO: 2146 - protein, 113 aa, Synthetic construct
GGGLVKPGGSLRLSCAASGLTFSTYAMSWVRQAPGKGLEWVSAISPGSGDNIYYGDSVKGRFTISRDNSKNTLYLQMNSLRAEDTAVYYCVNGGFSGYYSDYWGQGTLVAVSS

SEQ ID NO: 2147 - protein, 117 aa, Synthetic construct
GGGLGQPGGSLRLSCGASGFTFSTYAMTWVRQAPGKGLEWVSDISADSDTTSYADSVKGRFTISRDNSKNTLYLQMNSLRAEDSAVYYCAKVKDSSGYMYYYYMDVWGKGTTVTVSS

SEQ ID NO: 2148 - protein, 122 aa, Synthetic construct
EVQLVESGGGLVQPGGSLRLSCAASGFTFRTYAMTWVRQAPGKGLDWVSAITGDGGNTYYADSVKGRFTISRDNSKNTLYLQMNSLRAEDTAIYYCAKDQRFSFALYYFDYWGQGTLVTVSS

SEQ ID NO: 2149 - protein, 124 aa, Synthetic construct
EVQLVESGGGLVQPGGSLRLSCAASGFTFSSYAMNWVRQAPGKGLEWVSAISGSGDSTYYADSVKGRFTISRDNSRTTLSLQLNSLRAEDTAVYYCAKDRLLWFGELGSPFHYWGQGTLVTVSS

SEQ ID NO: 2150 - protein, 117 aa, Synthetic construct
EVQLVESGGGLVQPGGSLRLSCAASGFTFSTYAMSWVRQAPGKGLEWVSTISGRSDITYFADSVKGRFTVSRDNSKTTLYLQMNSLRAEDTAVYYCATDDDLPLDYWGQGTLVTVSS

SEQ ID NO: 2151 - protein, 127 aa, Synthetic construct
QVQLVQSGAEVKRPGSSVKVSCKASGGTFSTYAINWVRQAPGQGLEWMGGIIPIFGTTNYAQKFQGRVTITTDGSTTTTYMELSSLRSEDTAVYYCARTVYDLNSKGYYYYYGLDVWGQGTTVTVSS

SEQ ID NO: 2152 - protein, 120 aa, Synthetic construct
EVQLVESGGGLVQPRGSLRLSCAASGFTFSSYAMNWVRQAPGKGLEWVAVISYDGSNKYYADSVKGRFTISRDNSKNTLYLQMNSLRAEDTAVYYCAKDRYITLPNALDYWGQGTLVTVS

SEQ ID NO: 2153 - protein, 118 aa, Synthetic construct
QVQLQQSGGGLVHPGGSLRLSCAASGFTVDTYAMTWVRQAPGKGLEWVSGISGSGGSTYYADSVKGRFTISRDNSKNTLYLQMNSLRDEDTAVYYCAKIVGVTHFDYWGQGTLVTVSS

SEQ ID NO: 2154 - protein, 124 aa, Synthetic construct
MQVQLQASGGGVVQAGGSLRLTCAASGRTYAMGWFRQAPGKERDFAAAINWIGSTTDYADSVKGRFTISRDIAKNTMYLQMNSLKPEDTAVYYCAAEKTASLSIYRRAYDYGYWGQGTLVTVSS

SEQ ID NO: 2155 - protein, 115 aa, Synthetic construct
MQVQLQESGGGLVQAGGSLRLSCVASGITFNTYAMGWYRQAPGKQRERVAVISNFGVTVYENSVKGRFTISRDNAKNAVYLQMNNLRSEDTAVYFCSAIRGVNYWGQGTLVTVSS

SEQ ID NO: 2156 - protein, 122 aa, Synthetic construct
EVQLVESGGGLVQPGGSLRLSCAASGFTLSTYAMTWVRQAPGKGLEWVSAINYRAANTWYADSVKGRFTISRDNSKNTLYLQMNSLRDEDTAVYYCAQDRVIIKDYYVMDVWGQGTTVTVSS

SEQ ID NO: 2157 - protein, 125 aa, Synthetic construct
EGQLLESGGDLVQPGGSLRLSCATSGFTFSNYAMNWVRQAPGKGLEWISVISVSGGSTYYADSVKGRFTISRDNSKNTLYLQMNSLRAEDTAVYYCAKDYYYDSGSYYDSFFDYWGQGTLVTVSS

SEQ ID NO: 2158 - protein, 125 aa, Synthetic construct
EVQLLESGGGLVQPGGSLRLSCAASGFTFSNYAMNWVRQAPGKGLEWVSVISVSGGSTYYADSVKGRFTISRDNSKNTLYLQMNSLRAEDTAVYYCAKDYYYDSGSYYDSFFDYWGQGTLVTVSS

SEQ ID NO: 2159 - protein, 125 aa, Synthetic construct
EVQLLESGGGLVQPGGSLRLSCATSGFTFSNYAMNWVRQAPGKGLEWISVISVSGGSTYYADSVKGRFTISRDNSKNTLYLQMNSLRAEDTAVYYCAKDYYYDSGSYYDSFFDYWGQGTLVTVSS

SEQ ID NO: 2160 - protein, 125 aa, Synthetic construct
EVQLLESGGDLVQPGGSLRLSCAASGFTFSNYAMNWVRQAPGKGLEWISVISVSGGSTYYADSVKGRFTISRDNSKNTLYLQMNSLRAEDTAVYYCAKDYYYDSGSYYDSFFDYWGQGTLVTVSS

SEQ ID NO: 2161 - protein, 125 aa, Synthetic construct
EVQLLESGGDLVQPGGSLRLSCATSGFTFSNYAMNWVRQAPGKGLEWVSVISVSGGSTYYADSVKGRFTISRDNSKNTLYLQMNSLRAEDTAVYYCAKDYYYDSGSYYDSFFDYWGQGTLVTVSS

SEQ ID NO: 2162 - protein, 118 aa, Synthetic construct
VQLVESGGGVVRPGESLRLSCAASGFSFSSYAMNWVRQAPGEGLEWVSRINSGGGGTDYAESVKGRFTISRDNSENTLYLQMNSLRAEDTAVYYCAKQYDWNSFFDYWGLGALVTVSS

SEQ ID NO: 2163 - protein, 118 aa, Synthetic construct
VQLVESGGGVVRPGESLRLSCAASGFSFSSYAMNWVRQAPGEGLEWVSRINSGGGGTDYAESVKGRFTISRDNSENTLYLQMNSLRAEDTAVYYCAKQYDWNGFFDYWGLGALVTVSS

SEQ ID NO: 2164 - protein, 118 aa, Synthetic construct
VQLVESGGGVVRPGESLRLSCAASGFSFRSYAMNWVRQAPGEGLEWVSRIDSGGGGTDYADSVKGRFTISRDNSKNTLYLQMNSLRAEDTAVYYCAKQYDWNSFFDYWGLGAPVTVSS

SEQ ID NO: 2165 - protein, 118 aa, Synthetic construct
VQLVESGGGVVRPGESLRLSCAASGFTFSNYAMNWVRQAPGEGLEWVSGISGRGGDTYYADSVKGRFTISRDNSKNTLYLQMNSLRAEDTAIYYCAKGTWNYGSFDYWGLGTLVTVSS

SEQ ID NO: 2166 - protein, 119 aa, Synthetic construct
DVQLVESGGGVVRPGESLRLSCAASGFSFSSYAMNWVRQAPGEGLEWVSRINSGGGGTDYAESVKGRFTISRDNSENTLYLQMNSLRAEDTAVYYCAKQYDWNSFFDYWGLGALVTVSS

SEQ ID NO: 2167 - protein, 119 aa, Synthetic construct
DVQLVESGGGVVRPGESLRLSCAASGFSFRSYAMNWVRQAPGEGLEWVSRINSGGGGTDYADSVKGRFTISRDNSKNTLYLQMNSLRAEDTAVYYCAKQYDWNSFFDYWGLGALVTVSS

SEQ ID NO: 2168 - protein, 119 aa, Synthetic construct
DVQLVESGGGVVRPGESLRLSCAASGFSFSSYAMNWVRQAPGEGLEWVSRINSGGGGTDYAESVKGRFTISRDNSENTLYLQMNSLRAEDTAVYYCAKQYDWNGFFDYWGLGALVTVSS

SEQ ID NO: 2169 - protein, 121 aa, Synthetic construct
EVQLLESGGGLVQPGGSLRLSCAASGFTFSTYAMSWVRQAPGKGLEWVSAISGSGGSTYYADSVKGRFTISRDNSKNTLYLQMNSLRAEDTAVYYCAKGPRYQDRAGMDVWGQGTTVTVSS

SEQ ID NO: 2170 - protein, 118 aa, Synthetic construct
QIQLVQSGPELKKPGETVKVSCKASGYMFTNYAMNWVKQAPEKGLKWMGWINTHTGDPTYADDFKGRIAFSLETSASTAYLQINNLKNEDTATYFCVRTYGNYAMDYWGQGTSVTVSS

SEQ ID NO: 2171 - protein, 124 aa, Synthetic construct
EVQLLESGGGLVQPGGSLRLSCAASGFTFSSYAMNWVRQAPGKGLEWVSSISGGGRSTYYADSVKGRFTISRDNSKNTLYLQMNSLRAEDTAVYYCARDLSPSDVGWGYGFDIWGQGTLVTVSS

SEQ ID NO: 2172 - protein, 116 aa, Synthetic construct
EVQLLESGGGLVQPGGSLRLSCAASGFTFNNYAMNWVRQAPGKGLEWVSVISGSGGTTYYADSVKGRFTISRDNSKNTLYLQMNSLRAEDTAVYYCASGIWDLRYWGQGTLVTVSS

SEQ ID NO: 2173 - protein, 124 aa, Synthetic construct
EVQLLESGGGLVQPGGSLRLSCAASGFTFSSYAMNWVRQAPGKGLEWVSAISGGGRSTYYADSVKGRFTISRDNSKNTLYLQMNSLRAEDTAVYYCARDLSPSDVGWGYGFDIWGQGTLVTVSS

SEQ ID NO: 2174 - protein, 116 aa, Synthetic construct
QIQLVQSGPELKKPGETVKISCKASGYTFTTYAMSWVKQAPGKGLKWMGWINTYSGVPTYADDLKGRFAFSLETSASTAYLQINNLKNEDTATYFCARGPYAMDYWGQGTSVTVSS

SEQ ID NO: 2175 - protein, 118 aa, Synthetic construct
QVQLVQSGAEVKKPGSSVKVSCKASGYTFTSYHIHWVRQAPGQGLEWMGWIYPGNVNTEYNEKFKGKATITADKSTSTAYMELSSLRSEDTAVYYCAREEITYAMDYWGQGTTVTVSS

SEQ ID NO: 2176 - protein, 118 aa, Synthetic construct
EVQLVESGGGLVKPGGSLRLSCAASGYTFTSYHIHWVRQAPGKGLEWVGWIYPGNVNTEYNEKFKGRFTISRDDSKNTLYLQMNSLKTEDTAVYYCAREEITYAMDYWGQGTTVTVSS

SEQ ID NO: 2177 - protein, 118 aa, Synthetic construct
QVQLVQSGAEVKKPGSSVKVSCKASGYTFTSYHMHWVRQAPGQGLEWIGYIYPGNVNTEYNEKFKGKATLTADKSTNTAYMELSSLRSEDTAVYFCAREEITYAMDYWGQGTLVTVSS

SEQ ID NO: 2178 - protein, 121 aa, Synthetic construct
QVQLVQSGSELKKPGASVKVSCKASGYTFTSYAMNWVRQAPGQGLEWMGWINTNTGNPTYAQGFTGRFVFSFDTSVSTAYLQICSLKAEDTAVYYCARGGRAHSSWYFDLWGRGTLVTVSS

SEQ ID NO: 2179 - protein, 118 aa, Synthetic construct
QVQLVQSGSELKKPGASVKVSCKASGYTFTSYAMNWVRQAPGQGLEWMGWINTNTGNPTYAQGFTGRFVFSFDTSVSTAYLQICSLKAEDTAVYYCARGTSYWYFDLWGRGTLVTVSS

SEQ ID NO: 2180 - protein, 118 aa, Synthetic construct
QVQLQQSGPELVKPGASVRISCKASGYTFTSYHIHWVKQRPGQGLEWIGWIYPGNVNTEYNEKFKGKATLTADKSSSTAYMHLSSLTSEDSAVYFCAREEITYAMDYWGQGTSVTVSS

SEQ ID NO: 2181 - protein, 123 aa, Synthetic construct
  VARIANT 18: note = X can be any amino acid
EVQLLESGGGLMQPGGSXRLSCAASGFTFRSYAMNWVRQAPGKGLEWVSTISGNGGTTYYADSVRGRFTISRDNSKNTLFLQMNSLRAEDTAIYYCAQGEPWSGYLEPLFASWGQGTLVTVSS

SEQ ID NO: 2182 - protein, 124 aa, Synthetic construct
EVQLVESGGGLVHPGGSLRLSCAASGFTFRTYIMNWVRQAPGKGLEWISYISASSGTIYYADSVKGRFTISRDNAKNSLYLQMNSLRAEDTAVYYCARDLDCSGGTCYDGFDSWGHGTLVTVSS

SEQ ID NO: 2183 - protein, 142 aa, Synthetic construct
MEFGLSWLFLVAILKGVHCEVDLLESGGGLIQPGGSLRLSCAASGFTFRNYAMNWVRQVPGKGLEWVSSVSGSGGTTYYADSVKGRFSISRDNSKNTLYLQMNGLRAGDTAIYYCAKGEAWSGYLEPLCDFWGHGTLVTVSS

SEQ ID NO: 2184 - protein, 123 aa, Synthetic construct
EVQLLESGGGLMQPGGSLRLSCAASGFTFRSYAMNWVRQAPGKGLEWVSTISGNGGTTYYADSVRGRFTISRDNSKNTLFLQMNSLRAEDTAIYYCAQGEPWSGYLEPLFASWGQGTLVTVSS

SEQ ID NO: 2185 - protein, 123 aa, Synthetic construct
EVQLLESGGGSVQPGGSLRLSCAASGFTFRNYAMNWVRQSPGKGLEWVSTISGTGGTTYYADSVKGRFSISRDNSRNTLYLNMNNLRVEDTAIYYCAKGEPWSNYLEPLFDHWGQGTLVTVSS

SEQ ID NO: 2186 - protein, 147 aa, Synthetic construct
MDWTWRILFLVAAATGAHSQVQLVQSGTEVKKPGASVKVSCKASGYTFNKYAMNWVRQAPGQRLEWMGYINADNGNTKYSQKFRDRVTITRDTSASIVYMELRSLRSEDTAMYYCARDGGWSTTVNNQPYYYGMDVWGQGTTVTVSS

SEQ ID NO: 2187 - protein, 125 aa, Synthetic construct
EVQLVESGGGLVKPGGSLRLSCAASGFTFSTYSMNWVRQAPGKGLEWVSSISSSGTYTYYADSVKGRFTISRDNAKDSLYLQMNSLRADDTAVYYCARAPYDYGDYRGGRYFDLWGRGSLVTVSS

SEQ ID NO: 2188 - protein, 117 aa, Synthetic construct
EVQLVESGGDLVKPAGSLRLSCVASGFTFRTYVMNWVRQAPGKGLQWVASINGGGSSPTYADAVRGRFTVSRDNAQNSLFLQMNSLRAEDTAVYFCVVSMVGPFDYWGQGTLVTVSS

SEQ ID NO: 2189 - protein, 117 aa, Synthetic construct
EVQLVESGGDLVKPAGSLRLSCVASGFTFRTYVMNWVRQAPGKGLQWVASINGGGSSPTYADAVRGRFTVSRDNAQNSLFLQMNSLRAEDTAIYFCVVSMVGPFDYWGHGTLVTVSS

SEQ ID NO: 2190 - protein, 117 aa, Synthetic construct
MNRKEYAMNPYIYLGGAILAEVIGTTLMKFSEGFTRLWPSVGTIICYCASFWLLAQTLAYIPTGIAYAIWSGVGIVLISLLSWGFFGQRLDLPAIIGMMLICAGVLVINLLSRSTPH

SEQ ID NO: 2191 - protein, 117 aa, Synthetic construct
MNRKEYAMNPYIYLGGAILAEVIGTTLMKFSEGFTRLWPSVGTIICYCASFWLLAQTLAYIPTGIAYAIWSGVGIVLISLLSWGFFGQRLDLPAIIGMMLICAGVLVINLLSRSAPH

SEQ ID NO: 2192 - protein, 80 aa, Synthetic construct
MNRKEYAMNPYIYLGGAILAEVIGTTLMKFSEGFTRLWPSVGTIICYCASFWLLAQTLAYIPTGIAYAIWYMRTFISCKR

SEQ ID NO: 2193 - protein, 113 aa, Synthetic construct
EVQLQQSGADLVRPGASVKLSCTTSGFNIKDTYVHWVKQRPEQGLEWIGRIDPANGLTTFDPRFQAKATITADTSSNTAYLQLSSLTSEDTAVYYCTYAMEYWGQGTSVTVSS

SEQ ID NO: 2194 - protein, 125 aa, Synthetic construct
EVQLVESGGGLVQPGGSLRLSCAASGFSFNTYNMNWVRQAPGKGLEWISDITSSGSMRSYADAVKGRFTISRDNAKNSLHLQMNSLRVEDTAVYYCTRGWHDDLWSGYSYGLDVWGQGTTVTVSS

SEQ ID NO: 2195 - protein, 120 aa, Synthetic construct
EVQLVESGGGLVQPGGSLRLSCAASGFIFSTYSMNWVRQAPGKGLEWVSYISSSSNTIYYADSVKGRFTISRDNAKNSLYLQMNSLRDADTAVYYCARDGGRSGYFDDYWGQGTLVTVSS

SEQ ID NO: 2196 - protein, 130 aa, Synthetic construct
QVQLVQSGAEVKKPGASVKVSCKASGYTFTTYGISWVRQAPGQGLEWMGWISAYNGNTTYAQNFHARVTMTTDTSTSTAYMELRSLRSDDTAVYFCARTSARTITIFGVLIPAGLNLDYWGQGTLVTVSS

SEQ ID NO: 2197 - protein, 123 aa, Synthetic construct
QVTLRESGGGLVQAGGSLRLSCKGSGRAINTYAMGWFRQAPGKEREFVAAISWNGGHTRYADSVQGRFAISRDNADNTMYLQMNSLKPEDTAVYHCAAYSDYHRIATMEADADSWGQGTQVTV

SEQ ID NO: 2198 - protein, 118 aa, Synthetic construct
EVQLLESGGGLAQPGGSLRLSCAASGFTFSSYAMNWIRQAPGKGLEWVSGISGSGGSTYYADSVKGRFTISRDNSKNTVYLQMNSLRAEDTAVYYCVKDWNTTMITERGQGTLVTVSS

SEQ ID NO: 2199 - protein, 118 aa, Synthetic construct
EVQLLESGGGLVQPGRSLRLSCAASGFTFTNYAMNWVRQAPGKGLEWVSGISGGGGSTYYADSVKGRFTISRDNSKNTLYLQMNSLRAEDTAVYYCVKDWNTTMITERGQGTLVTVSS

SEQ ID NO: 2200 - protein, 118 aa, Synthetic construct
EVQLLESGGGLVQPGGSLRLSCAASGFTFSSYAMNWVRQAPGKGLEWVSGITGSGGTTYYADSVKGRFTISRDNSKNTLYLQMNSLRAEDTAVYYCVKDWNTTMITERGQGTLVTVSS

SEQ ID NO: 2201 - protein, 118 aa, Synthetic construct
EVQLLESGGGLVQPGGSLRLSCAASGFTFSSYAMNWVRQAPGKGLEWVSGLTGNGDSTYYADSVKGRFTISRDNSKNTVYLQMNSLRAEDTAVYYCVKDWNTTMITERGQGTLVTVSS

SEQ ID NO: 2202 - protein, 118 aa, Synthetic construct
EVQLLESGGGLVQPGGSLRLSCAASGFTFSSYAMNWVRQAPGKGLEWVSGITGSGGSTYYADSVKGRFSISRDNSKNTLDLQMNSLRAEDTAVYYCVKDWNTTMITERGQGTLVTVSS

SEQ ID NO: 2203 - protein, 118 aa, Synthetic construct
EVQLLESGGGLVQPGGSLRLSCAASGFTFSSYAMNWVRQAPGKGLEWVSGIIGSGGSTYYADSVKGRFTISRDNSKNTLYLQMNSLRAEDTAVYYCVKDWNTTMITERGQGTLVTVSS

SEQ ID NO: 2204 - protein, 118 aa, Synthetic construct
EVQLLESGGGLVQPGGSLRLSCAASGFTFSSYAMNWVRQAPGKGLEWVSGIIGSGGSTYYADSVKGRFTISRDNSKNTVYLQMNSLRAEDTAVYYCVKDWNTTMITERGQGTLVTVSS

SEQ ID NO: 2205 - protein, 118 aa, Synthetic construct
EVQLLESGGGLVQPGGSLRLSCAASGFTFSSYAMNWVRQAPGKGLEWVSGITGSGDSTYYAASVKGRFSISRDNSQNTLDLQMNSLRAEDTAVYYCVKDWNTTMITERGQGTLVTVSS

SEQ ID NO: 2206 - protein, 118 aa, Synthetic construct
EVQLLESGGGLVQPGGSLRLSCAASGFTFSRYAMNWIRQAPGKGLEWVSGIVGSGGNTYYADSVKGRFSISRDNSKNTLYLQMNSLRAEDTAVYYCVKDWNTTMITERGQGTLVTVSS

SEQ ID NO: 2207 - protein, 118 aa, Synthetic construct
EVQLLESGGGLVQPGGSLRLSCAASGFTFSNYAMNWVRQAPGNGLEWVSGLTGSGGSTYYADSVKGRFTISRDNSKNTVYLQMNSLRAEDTAVYYCVKDWNTTMITERGQGTLVTVSS

SEQ ID NO: 2208 - protein, 118 aa, Synthetic construct
EVQLLESGGGLVQPGGSLRLSCAASGFTFTNYAMNWVRQAPGKGLEWVSGIIGSGGSTYYADSVKGRFTISRDNSKNTLYLQMNSLRAEDTAVYYCVKDWNTTMITERGQGTLVTVSS

SEQ ID NO: 2209 - protein, 118 aa, Synthetic construct
EVQLLESGGGVVQPGRSLRLSCAASGFTFSNYAMNWVRQAPGKGLEWVSGIIGSGGSTYYADSVKGRFTISRDNSKNTLYLQMNSLRAEDTAVYYCVKDWNTTMITERGQGTLVTVSS

SEQ ID NO: 2210 - protein, 118 aa, Synthetic construct
EVQLLESGGGLVQPGGSLRLSCAASGFTFSNYAMNWVRQAPGKGLEWVSGIIGSGGSTYYADSVKGRFTISRDNSKNTLYLQMNSLRAEDTAVYYCVKDWNTTMITERGQGTLVTVSS

SEQ ID NO: 2211 - protein, 118 aa, Synthetic construct
EVQLLESGGGLVQPGGSLTLSCAASGFTFSNYAMNWVRQAPGKGLEWVSGIIGSGATTYYADSVKGRFTISRDNSKNTLNLQMNSLRAEDTAIYYCVKDWNTTMITERGQGTLVTVSS

SEQ ID NO: 2212 - protein, 118 aa, Synthetic construct
EVQLLESGGGVVQPGRSLRLSCAASGFTFSSYAMNWVRQAPGKGLEWVSGIIGSGGSTYYADSVKGRFTISRDNSKNTLYLQMNSLRAEDTAVYYCVKDWNTTMITERGQGTLVTVSS

SEQ ID NO: 2213 - protein, 118 aa, Synthetic construct
EVQLLESGGGLVQPGESLRLSCAASGFTFSNYAMNWVRQAPGKGLEWVSGIVGGGGTSYYADSVRGRFTISRDNSKNTLYLQMNSLRAEDTAVYYCVKDWNTTMITERGQGTLVTVSS

SEQ ID NO: 2214 - protein, 118 aa, Synthetic construct
EVQLLESGGGLVQPGGSLRLSCAASGFTFSNYAMNWVRQAPGKGLEWVSGITGSGGSTYYADSVKGRFTISRDNSKNTLYLQMNSLRVEDTAVYYCVKDWNTTMITERGQGTLVTVSS

SEQ ID NO: 2215 - protein, 118 aa, Synthetic construct
EVQLLESGGGLVQPGGSLRLSCAASGFTFSSYAMNWVRQAPGKGLEWVSGIVGGGGTSYYADSVRGRFTISRDNSKNTLYLQMNSLRAEDTAVYYCVKDWNTTMITERGQGTLVTVSS

SEQ ID NO: 2216 - protein, 118 aa, Synthetic construct
EVQLLESGGGLVQPGGSLRLSCAASGFTFSNYAMNWVRQAPGKGLEWVSGIIGSGGSTYYADSVKGRFTISRDNSKNTLYLQMNSLRVEDTAVYYCVKDWNTTMITERGQGTLVTVSS

SEQ ID NO: 2217 - protein, 113 aa, Synthetic construct
LEQSGPSLVKPSQTLSLTCSVTGDSITSGYWNWIRKFPGNKLEYMGYISYSGSTYYNLSLRSRISITRDTSKNQYYLQLNSVTTEDTATYYCALITTTTYAMDYWGQGTTVTV

SEQ ID NO: 2218 - protein, 127 aa, Synthetic construct
  VARIANT 1: note = X can be any amino acid
XENILVLDIFFEVLNYETIEQKKAYEIAGLLGDIGGQMGLFIGASILTVLELFDYAYEVIKHKLCRRGKCQKEAKRSSADKGVALSLDDVKRHNPCESLRGHPAGMTYAANILPHHPARGTFEDFTC

SEQ ID NO: 2219 - protein, 117 aa, Synthetic construct
MDWTWRILFLVAAATGAHSQVQLVQSGSELKKPGASVKVSCKASGYTFTSYAMNWVRQAPGQGLEWMGWINTNTGNPTYAQGFTGRFVFSLDTSVSTAYLQICSLKAEDTAVYYCAR

SEQ ID NO: 2220 - protein, 119 aa, Synthetic construct
QVQLVQSGSELKKPGASVKISCKASGYTFTSYAMNWVRQAPGQGLESMGWINTNTGNPTYAQGFTGRFVFSMDTSVSTAYLQISSLKAEDTAIYYCAPRYSSSWYLDYWGQGTLVTVSS

SEQ ID NO: 2221 - protein, 117 aa, Synthetic construct
MDWTWSILFLVAAATGTYSQVQLVQSGHEVKQPGASVKVSCKASGYSFTTYGMNWVPQAPGQGLEWMGWFNTYTGNPTYAQGFTGRFVFSMDTSASTAYLQISSLKAEDMAMYYCAR

SEQ ID NO: 2222 - protein, 138 aa, Synthetic construct
MATKRLFGATRTWAGWGAWELLNPATSGRLLARDYAKKPVMKGAKSGKGAVTSEALKDPDVCTDPVQLTTYAMGVNIYKEGQDVPLKPDAEYPEWLFEMNLGPPKTLEELDPESREYWRRLRKQNIWRHNRLSKNKRL

SEQ ID NO: 2223 - protein, 139 aa, Synthetic construct
MAGKKVLIVYAHQEPKSFNGSLKNVAVDELSRQGCTVTVSDLYAMNLEPRATDKDITGTLSNPEVFNYGVETHEAYKQRSLASDITDEQKKVREADLVIFQFPLYWFSVPAILKGWMDRVLCQGFAFDIPGFYDSGLLQ

SEQ ID NO: 2224 - protein, 84 aa, Synthetic construct
MSKTMAMNLLEDWCRGMEVDIHRSLLVTGIPEDCGQAEIEETLNGVLSPLGPYRVLNKIFVREENVKAALIENPERFDLGDHPY

SEQ ID NO: 2225 - protein, 122 aa, Synthetic construct
  VARIANT 1: note = X can be any amino acid
XSMSKEAVAICKGLMTKHPGKRLGCGPEGERDIKEHAFFRYIDWEKLERKEIQPPYKPKAVSSPFSLTAGYSHTRYSCLCLMFSKCSLRGRRQCVYWNMGVCIHTYAQNHWLLRWTFSIGPA

SEQ ID NO: 2226 - protein, 123 aa, Synthetic construct
MGAAAAEADRTLFVGNLETKVTEELLFELFHQAGPVIKVKIPKDKDGKPKQFAFVNFKHEVSVPYAMNLLNGIKLYGRPIKIQFRSVVMPHKMSVCHIPNIMLEIQALPPHLLAAGTKGLWIT

SEQ ID NO: 2227 - protein, 149 aa, Synthetic construct
MGAAAAEADRTLFVGNLETKVTEELLFELFHQAGPVIKVKIPKDKDGKPKQFAFVNFKHEVSVPYAMNLLNGIKLYGRPIKIQFRSGSSHAPQDVSLSYPQHHVGNSSPTSTSPSSRYERTMDNMTSSAQIIQRSFSSPENFQRQAVVG

SEQ ID NO: 2228 - protein, 121 aa, Synthetic construct
  VARIANT 1: note = X can be any amino acid
XDVGTAISCSRVFSSRWGRGFGLVEHVLGQDSILNQSNSIFGCIFYTLQLLLGCLRTRWASVLMLLSSLVSLAGSVYLAWILFFVLYDFCIVCITTYAINVSLMWLSFRKVQEPQGKAKRH

SEQ ID NO: 2229 - protein, 148 aa, Synthetic construct
  VARIANT 1: note = X can be any amino acid
XAAEADRTLFVGNLETKVTEELLFELFHQAGPVIKVKIPKDKDGKPKQFAFVNFKHEVSVPYAMNLLNGIKLYGRPIKIQFRSGSSHAPQDVSLSYPQHHVGNSSPTSTSPSSRYERTMDNMTSSAQIIQRSFSSPENFQRQAVITLV

SEQ ID NO: 2230 - protein, 78 aa, Synthetic construct
MSLPKTPSTPLNSTSTSESKKLKVSVAKEGTRGLPELKEKKNMVDRSKLLPTSLQNEFIPKEVLLSLTYAANAGPCPE

SEQ ID NO: 2231 - protein, 123 aa, Synthetic construct
MVDRSKLLPTSLQNEFIPKEVLLSLTYAANAGPCPENLLPPKKIKTPKGTLPRLVDHVWHHPVRRNKFKYLIDHPVSLTGAGRDISFLYDVTYAKGQTREKAVCPPHLARSLQSHDGVIVPHK

SEQ ID NO: 2232 - protein, 105 aa, Synthetic construct
MAGLPRRIIKETQRLLAEPVPGIKAEPDESNARYFHVVIAGPQDSPFEGGTFKLELFLPEEYPMAAPKVRFMTKIYHPNVDKLGRICLDILKARAWTRLYAMNNI

SEQ ID NO: 2233 - protein, 89 aa, Synthetic construct
MAAPKVRFMTKIYHPNVDKLGRICLDILKDKWSPALQIRTVLLSIQALLSAPNPDDPLANDVAEQWKTNEAQAIETARAWTRLYAMNNI

SEQ ID NO: 2234 - protein, 125 aa, Synthetic construct
QVQLVQSGSELKKPGASVKVSCKASGYTFTSYAMNWVRQAPGQGLEWMGWINTNTGNPTYAQGFTGRFVFSLDTSVSTAYLQISSLKAEDTAVYYCARSSLYWMGSKWSRQTDMWGQGTLVTVSS

SEQ ID NO: 2235 - protein, 117 aa, Synthetic construct
QVQLVQSGSELKKPGASVKVSCKASGYTFTSYAMNWVRQAPGQGLEWMGWINTNTGNPTYAQGFTGRFVFSLDTSVSTAYLQISSLKAEDTAVYYCARGYYGKYDKWGQGTLVTVSS

SEQ ID NO: 2236 - protein, 114 aa, Synthetic construct
QMQLVQSGSELKKPGASVKVSCKASGYTFTSYAMNWVRQAPGQGLEWMGWINTNTGNPTYAQGFTGRFVFSLDTSVSTAYLQISSLKAEDTAVYYCARQSHDEWGQGTLVTVSS

SEQ ID NO: 2237 - protein, 119 aa, Synthetic construct
AVTLDESGGGLQTPGGALSLVCKASGFTFSTYAMGWMRQAPGKGLEYVAAIRNDGSWTGYGAAVKGRATILRDNGQSTVRLQLSNLRAEDTGTYYCAKYTGSSGGSIGAWGHGTEVIVS

SEQ ID NO: 2238 - protein, 120 aa, Synthetic construct
EVQLLESGGGLVQPGGSLRLSCAASGFTFSTYAMGWVRQAPGKGLEFVAAIRNDGSWTGYGAAVKGRFTISRDNSKNTLYLQMNSLRAEDTAVYYCAKYTGSSGGSIGAWGQGTLVTVSS

SEQ ID NO: 2239 - protein, 120 aa, Synthetic construct
EVQLLESGGGLVQPGGSLRLSCAASGFTFSTYAMGWVRQAPGKGLEFVSAIRNDGSWTGYGAAVKGRFTISRDNSKNTVYLQMNSLRAEDTAVYYCAKYTGSSGGSIGAWGQGTLVTVSS

SEQ ID NO: 2240 - protein, 120 aa, Synthetic construct
EVQLLESGGGLVQPGGSLRLSCAASGFTFSTYAMGWVRQAPGKGLEFVAAIRNDGSWTGYGAAVKGRVTISRDNSKNTVYLQMNSLRAEDTAVYYCAKYTGSSGGSIGAWGQGTLVTVSS

SEQ ID NO: 2241 - protein, 124 aa, Synthetic construct
MAQVQLVESGGGLVQAGDSLQLSCAFSGGTFSTYAMGWFRQAPGKEREFVGGISRSGATTNYEDSVKGRFTISKDNTKNTVYLQLNSLKPEDTAVYYCAARNNILPVTTIDKYEYWGQGTQVTV

SEQ ID NO: 2242 - protein, 118 aa, Synthetic construct
EVQLVESGGGLVQPGGSLRLSCAASGYVFTDYAMNWVRQAPGKGLEWMGWINTYIGEPIYADSVKGRFTFSLDTSKSTAYLQMNSLRAEDTAVYYCARGYRSYAMDYWGQGTLVTVSS

SEQ ID NO: 2243 - protein, 117 aa, Synthetic construct
EVQLLESGGDLVQPGGSLRLSCAASGFTFSTYAMSWVRQAPGKGLEWVSGIGDSGHSIYYADSVKGRFTISRDNSKNTLYLQMNSLRAEDTAVYYCATGSQWPGDYWGQGTLVTVSS

SEQ ID NO: 2244 - protein, 117 aa, Synthetic construct
QVQLVQSGSELKKPGASVKVSCKASGYTFSTYAMNWVRQAPGQGLEWMGWINTNTGNPTYAQGFTGRFVFSLDTSVSTAYLQISSLKAEDTAVYYCARDRDRGTDYWGQGTLVTVSS

SEQ ID NO: 2245 - protein, 117 aa, Synthetic construct
QVQLVQSGSELRKPGASVKVSCKASGYTFTNYAMNWVRQAPGQGLEWMGWINTNTGNPTYAQGFTGRFVFSLDTSVSSAYLQISSLKAEDTAMYYCATDRDRGTDYWGQGTLVTVSS

SEQ ID NO: 2246 - protein, 116 aa, Synthetic construct
QVQLVQSGSELKKPGASVKVSCKASGYTFTNYAMNWVRQAPGQGLEWMGWINTNTGNPTYAQAFTGRFVFSLDTSVSTAYLQISSLKAEDTAVYYCARDREVRDYWGQGTLVTVSS

SEQ ID NO: 2247 - protein, 110 aa, Synthetic construct
QSLEESGGRLVTPGTPLTLTCTVSGIDLSTYAMGWVRQAPGKGLEYIGIIRSSGRTYYASWAKGRFTVSKTSSTTVDLSMTSPTTEDTATYYCYRNVSLWGQGTLVSVSS

SEQ ID NO: 2248 - protein, 120 aa, Synthetic construct
  VARIANT 77: note = X can be any amino acid
EVQLVESGGGLVQAGGSLRLSCAASGRTFGTYAMGWFRQAPGKEREFVAAISWGGGSIVYAESAKGRFTISRDNAKXTMYLQMDSLKPEDTAVYYCAAANNIATLRQGSWGQGTQVTVSS

SEQ ID NO: 2249 - protein, 127 aa, Synthetic construct
EVQLVESGGELVQAGGSLKLSCTASGRNFVTYAMSWFRRAPGKEREFVASISWSGDTTYYSNSVKGRFTVSRDNGKNTAYLRMNSLKPEDTADYYCAVVQVIDPSWSGVNLDDYDYLGSGTQVTVSS

SEQ ID NO: 2250 - protein, 119 aa, Synthetic construct
EVQLLESGGGLVQPGGSLRLSCAASGFTFSTYAMSWVRQAPGKGLEWVSAISGSGGSTYYADSVKGRFTISRDNSKNTLYLQMNSLRAEDTAVYYCAKSKHSTTSLDVWGQGTMVTVSS

SEQ ID NO: 2251 - protein, 115 aa, Synthetic construct
QVQLQQPGSVLVRPGASVKLSCKASGDTFTTYWMNWVKQRPGQGLEWIGGIYLNSGSSEYNEKFKGKATLSVDTSSSTAYMDLSSLTSEDSAVYYCARDSRFSYWGQGTLVTVSA

SEQ ID NO: 2252 - protein, 115 aa, Synthetic construct
EVQLVQSGAEVKKPGASVKVSCKASGDTFTTYWMNWVRQAPGQRLEWMGGIYLNRGSSEYNEKFKGRVTLTVDTSASTAYMELSSLRSEDTAVYYCARDSRFSYWGQGTLVTVSS

SEQ ID NO: 2253 - protein, 122 aa, Synthetic construct
QVQLQESGGDLVQPGGSLRLSCAASGFTFSNYAMNWVRQAPGKGLEWVSAINRGGDSTYYADSVKGRFTISRDNSKNTLYLQMNSLRAEDTAVYYCAKDHGGKYGWWYFDLWGRGTLVTVSS

SEQ ID NO: 2254 - protein, 122 aa, Synthetic construct
EVQLLESGGGLVQPGGSLRLSCAASGFTFRNYAMNWVRQTPGKGLEWVSGISGGGDSTNYADSVKGRFTISRDNSRNTLYLQLNSLRAEDTAVYYCAKDLAVSTPRYWFDSWGQGTLVTVSS

SEQ ID NO: 2255 - protein, 121 aa, Synthetic construct
EVQLLESGGGVVQPGRSLRLSCAASGFTFTTYAMHWVRQAPGKGLEWVAAVSYDGNNKYYADSVKGRFTISRDNSRNTLYLQMNSLRAEDTAVYFCARNTYYDRSGLIAYWGQGALVTVSS

SEQ ID NO: 2256 - protein, 119 aa, Synthetic construct
QVQLVQSGAEVKKPGASVKVSCKASGYTFNTYAMTWVRQAPGQGLEWMGWISTYNGNTVFGQKFQGRVTLSTDTSTSTAYMELRSLTSDDTAVYYCAREDDDYYSMDVWGQGTTVTVSS

SEQ ID NO: 2257 - protein, 126 aa, Synthetic construct
QVQLVESGSELKKPGASVKVSCKASGYTFTSYAMNWVRQAPGQGLEWMGWINTNTGNPTYAQGFTGRFVFSLDTSVSTAYLQISSLKAEDTAVYYCVRGYCSSTSCYGGLYWFDPWGQGTLVTVSS

SEQ ID NO: 2258 - protein, 126 aa, Synthetic construct
QVQLVQSGSELKKPGASVKVSCKASGYTFTSYAMNWVRQAPGQGLEWMGWINTNTGNPTYAQGFTGRFVFSLDTSVSTAYLQISSLKAEDTAVYYCARGYCSSTSCYGGLYWFDPWGQGTLVTVSS

SEQ ID NO: 2259 - protein, 122 aa, Synthetic construct
EVQLLESGGALVEPGGSLRLSCAASGFSFNTYSMNWVRQGPGKGLEWVATISTSTAGSYYADSVRGRFTISRDNSKNTLYLQMNSLRVEDTAVYYCARDQEVELIDDAFDFWGRGTMVTVSS

SEQ ID NO: 2260 - protein, 131 aa, Synthetic construct
EVQLVESGGGLVQPGGSLRLSCAASGFSFNTYSMNWVRQAPGKGLEWLSFISSSSHTLYYADSVKGRFTVFRDNAKHSLFLQMNGLRDEDTAVYFCARSLGSGNYDNEDQTFYYYYGMDVWGQGTTVTVSS

SEQ ID NO: 2261 - protein, 124 aa, Synthetic construct
EVQLVESGGGLVKPGGSLRLSCAASGFTLSSYAMNWVRQAPGKGLEWVSSISAGSSYIDYADSVKGRFTISRDNAKNSLYLQMNNLRAEDTALYYCAREVLPATAIGGAWLDPWGQGTLVTVSS

SEQ ID NO: 2262 - protein, 124 aa, Synthetic construct
QVQLVESGGGLVKPGGSLRLSCVASGFTFSSYAMNWVRQAPGKGLDWVSSISAGSNFIDDADSVKGRFTISRDNARNSLFLQMNSLRAEDTAVYYCARIGYSSAHHYQYYMDVWGTGTTVTVSS

SEQ ID NO: 2263 - protein, 114 aa, Synthetic construct
  VARIANT 22: note = X can be any amino acid
  VARIANT 96: note = X can be any amino acid
EVQLQQSGPDLVKPGASVKISXKASGYSFTGYYMHWVKQSHGKSLEWIGRVNPNNGGTSYNQKFKGKAILTVDKSSSTAYMELRSLTSEDSAVYYXATYAMDYWGQGTSVTVSS

SEQ ID NO: 2264 - protein, 121 aa, Synthetic construct
  VARIANT 22: note = X can be any amino acid
  VARIANT 96: note = X can be any amino acid
QVQLQQPGAELVRPGASVKLSXKASGYTFTTYWMNWVKQRPEQGLEWIGRIDPYDSETHYNQKFKDKAILTVDKSSSTAYMQLSSLTSEDSAVYYXARGPYYGTNPWFPYWGQGTLVTVSS

SEQ ID NO: 2265 - protein, 118 aa, Synthetic construct
  VARIANT 22: note = X can be any amino acid
  VARIANT 96: note = X can be any amino acid
EVQLVESGGGLVQPGGSLRLSXAASGFTFNNYAMNWVRQAPGKGLDWVSTISGSGGTTNYADSVKGRFIISRDSSKHTLYLQMNSLRAEDTAVYYXAKDSNWGNFDLWGRGTLVTVSS

SEQ ID NO: 2266 - protein, 116 aa, Synthetic construct
  VARIANT 22: note = X can be any amino acid
  VARIANT 96: note = X can be any amino acid
EVQLLESGGGLVQPGGSLRLSXAASGFTFSSYAMSWVRQAPGKGLEWVSTISSGGSYTSYPDSVKGRFTISRDNSKNTLYLQMNSLRAEDTAVYYXAKQDYAMNYWGQGTLVTVSS

SEQ ID NO: 2267 - protein, 126 aa, Synthetic construct
  VARIANT 22: note = X can be any amino acid
  VARIANT 96: note = X can be any amino acid
EVQLVESGGGVIQPGGSLRLSXAASGFTFDDYAMNWVRQGPGKGLEWVSAISGDGGSTYYADSVKGRFTISRDNSKNSLYLQMNSLRAEDTAFFYXAKDLRNTIFGVVIPDAFDIWGQGTMVTVSS

SEQ ID NO: 2268 - protein, 125 aa, Synthetic construct
  VARIANT 22: note = X can be any amino acid
  VARIANT 96: note = X can be any amino acid
EVQLLESGGGLVQPGGSLRLSXTASGFTFSSYAMNWVRQAPGKGLEWVSAISGSGGTTFYADSVKGRFTISRDNSRTTLYLQMNSLRAEDTAVYYXAKDLGWSDSYYYYYGMDVWGQGTTVTVSS

SEQ ID NO: 2269 - protein, 119 aa, Synthetic construct
  VARIANT 22: note = X can be any amino acid
  VARIANT 96: note = X can be any amino acid
QVQLVQSGSELKKPGASVKISXKASGYTFTSYAMNWVRQAPGQGLESMGWINTNTGNPTYAQGFTGRFVFSMDTSVSTAYLQISSLKAEDTAIYYXAPRYSSSWYLDYWGQGTLVTVSS

SEQ ID NO: 2270 - protein, 119 aa, Synthetic construct
EVQLVESGGGLVQAGGSLRLSCAASGRTFDTYAMGWFRQAPGKEREFVAAITWGGGRTYYADSVKGRFTISADNAKNTVYLQMNSLKPEDTAVYYCAAVPRLYRDYDYWGQGTQVTVSS

SEQ ID NO: 2271 - protein, 117 aa, Synthetic construct
EVQLVESGGGLVQAGGSLRLSCAASGSTFSTYAMGWFRQAPGKEREFVASISRSGGRTYYADSVKGRFTISADNAKNTVYLQMNSLKPEDTAVYYCAAARYNERNSWGQGTQVTVSS

SEQ ID NO: 2272 - protein, 122 aa, Synthetic construct
EVQLVESGGGLVQAGGSLRLSCAASGSTFSTYAMGWFRQAPGKEREFVAAINRSGASTYYADSVKGRFTISADNAKNTVYLQMNSLKPEDTAVYYCAAALLGGRGGCGKGYWGQGTQVTVSS

SEQ ID NO: 2273 - protein, 116 aa, Synthetic construct
EVQLVESGGGLVQAGGSLRLSCAASGSILDTYAMGWFRQAPGKERELVSGINTSGDTTYYADSVKGRFTISADNAKNTVYLQMNSLKPEDTAVYYCAAVLAGYEYWGQGTQVTVSS

SEQ ID NO: 2274 - protein, 116 aa, Synthetic construct
EVQLVESGGGLVQPGGSLRLSCAASGFTFSTYAMGWFRQAPGKEREFVAAITWSGGSTNYADSVKGRFTISADNSKNTAYLQMNSLKPEDTAVYYCAAGRAGRDSWGQGTLVTVSS

SEQ ID NO: 2275 - protein, 122 aa, Synthetic construct
EVQLVESGGGLVQPGGSLRLSCAASGSTFSTYAMGWFRQAPGKERELVAAISWSSGTTYYADSVKGRFTISADNSKNTAYLQMNSLKPEDTAVYYCAAVLVTSDGVSEYNYWGQGTLVTVSS

SEQ ID NO: 2276 - protein, 119 aa, Synthetic construct
EVQLVESGGGLVQPGGSLRLSCAASGLTFSTYAMGWFRQAPGKEREIVAAITWSGGITYYADSVKGRFTISADNSKNTAYLQMNSLKPEDTAVYYCAAHGSILLDRIEWGQGTLVTVSS

SEQ ID NO: 2277 - protein, 119 aa, Synthetic construct
EVQLVESGGGLVQPGGSLRLSCAASGGTFDTYAMGWFRQAPGKEREFVAGISGDGTITYYADSVKGRFTISADNSKNTAYLQMNSLKPEDTAVYYCATDNPYWSGYNYWGQGTLVTVSS

SEQ ID NO: 2278 - protein, 117 aa, Synthetic construct
EVQLVESGGGLVQPGGSLRLSCAASGFTFSTYAMGWFRQAPGKERELVAGISSSGSSTYYADSVKGRFTISADNSKNTAYLQMNSLKPEDTAVYYCAVVSDGGYDYWGQGTLVTVSS

SEQ ID NO: 2279 - protein, 121 aa, Synthetic construct
QVQLQQSGAELVRPGSSVKISCKASGYAFSTYWMNWVKQRPGQGLEWIGQIYPGDDDTKYNGKFKGKASLTADKSSSTAYMQLISLTSEDSAVYFCARRYFRYDYWYSDVWGAGTTVTVTS

SEQ ID NO: 2280 - protein, 121 aa, Synthetic construct
QVQLVQSGAEVKKPGASVKVSCKASGYAFSTYWMNWVRQAPGQGLEWMGQIYPGDDDTKYSGKFKGRVTITADKSTSTAYMELSSLRSEDTAVYYCARRYFRYDYWYSDVWGQGTTVTVSS

SEQ ID NO: 2281 - protein, 113 aa, Synthetic construct
ANQVEQSPQSLIILEGKNVTLQCNYTVSPFSNLRWYKQDTGRGPVSLTILTYAINTKSNGRYTATLDADTKQSSLHITASQLSDSASYICVVNRADGLYIPTFGRGTSLIVHP

SEQ ID NO: 2282 - protein, 119 aa, Synthetic construct
EVQLVQSGAEVKKPGTSVKVSCKASGYTFSNYYIHWVRQAPGQGLEWMGAINPSVGTTTYAQNFQGRVTMTSDTSTSTVYMELSSLTSEDTAVYYCARDWWGQMMYDGWGQGTLVTVSS

SEQ ID NO: 2283 - protein, 116 aa, Synthetic construct
GIDCQGGSRMCCRQEFFVDFREIGWHDWIIQPEGYAMNFCIGQCPLHIAGMPGIAASFHTAVLNLLKANTAAGTTGGGSCCVPTARRPLSLLYYDRDSNIVKTDIPDMVVEACGCS

SEQ ID NO: 2284 - protein, 115 aa, Synthetic construct
EVQLVQSGGGLVQPGGSLRLSCAASGFTFSTYEMNWVRQAPGKGLEWVSYISSSGSTIYYADSVEGRFTISRDNARNSLFLQMNSLRAEDTATYFCAAKVGLDFWGRGTLVTVSP

SEQ ID NO: 2285 - protein, 121 aa, Synthetic construct
EVQLVESGGGLVQPGGSLRLSCAASGFTFSTYAMSWVRQAPGKGLEWVATISSGGSDTYYPDTVKGRFTISRDNAKNSLYLQMNSLRAEDTAVYYCARPTYYGIFSYFDYWGQGTLVTVSS

SEQ ID NO: 2286 - protein, 117 aa, Synthetic construct
DVQLVESGGDLVKPGGSLRLTCVASGFTFSDYAMNWVRQAPGKGLQWVAGIDSVGSGTSYADSVKGRFTISRDNAKNTLYLQMSGLKTEDTATYYCASGFPGSFEHWGQGTLVTVSS

SEQ ID NO: 2287 - protein, 121 aa, Synthetic construct
EVQLLESGGGLVQPGGSLRLSCAASGFTFSRYAMNWVRQAPGKGLEWVSAISASGGGTYYADSVKGRFTISRDNSKNTLYLQMNSLRAEDTAVYYCAKVRYGWGAGAFDYWGQGTLVTVSS

SEQ ID NO: 2288 - protein, 121 aa, Synthetic construct
EVQLLESGGGLVQPGGSLRLSCAASGFTFSRYAMNWVRQAPGKGLEWVSAINASGGSTYYADSVKGRFTISRDNSKNTLYLQMNSLRAEDTAVYYCAKVRYGWGAGAFDYWGQGTLVTVSS

SEQ ID NO: 2289 - protein, 122 aa, Synthetic construct
QVQLVQSGAEVKKPGASVKVSCKASGGTFNTYAINWVRQAPGQGLEWMGRIDPSSGGTKYAQNFQGRVTMTRDTSTSTVYMELSSLRSEDTAVYYCAKEHAAGTYYYYMDVWGKGTTVTVSS

SEQ ID NO: 2290 - protein, 116 aa, Synthetic construct
QVQLVQSGAEVKKPGASVKVSCKASGYTFTSYAMNWVRQAPGQGLEWMGRINPNSGGTNYAQKFQGRVTMTRDTSTSTVYMELSSLRSEDTAVYYCARGHGIPKYWGQGTLVTVSS

SEQ ID NO: 2291 - protein, 129 aa, Synthetic construct
EVQLVESGGGLVQPGGSLRLSCAASGFTFSTYAMTWVRQAPGKGLEWVSFISGSGDNTYYADSVKGRFTISRDNSKNTLYLQMNSLRADDSAIYHCAKDSGYCSSGGCSLYFYYGMDVWGQGTTVTVSS

SEQ ID NO: 2292 - protein, 118 aa, Synthetic construct
QVQLQESGPGLVRPSQTLSLTCTASGFTFSKYAMNWVRQPPGRGLEWVAFISNGGSYTEYNPSVKGRFTILRDNSKNQLSLRLSSVTAADTAVYYCARHDKGNALDYWGQGSLVTVSS

SEQ ID NO: 2293 - protein, 89 aa, Synthetic construct
HCEIVELFLSRGVDVDLDSITGTPLLTAAMNGQYSTMKILLEHHADVGADVNFRDPNGVTCVMVAANHGSPVIMKCLLDAGANSNIPDE

SEQ ID NO: 2294 - protein, 123 aa, Synthetic construct
QVQLVESGGGVVQPGRSLKLSCAVAGFTFRTYAMHWVRQAPGRGLEWVALISNDGTKKYSADSVRGHFTISRDNSKDTLYLQMNSLRPDDTAVYYCARAEYCSPGDCFLIDTWGQGTLVTVSS

SEQ ID NO: 2295 - protein, 121 aa, Synthetic construct
EVQLVESGGGLVKPGGSLKLSCAASGFTFTTYAMSWVRQTPEKRLEWVATISAGGTYTYYSDNVKGRFTISRDNAKNNLYLQMSHLKSEDTAMFYCARDPDYYGRSPFAYWGQGTLVTVSA

SEQ ID NO: 2296 - protein, 121 aa, Synthetic construct
EVQLLESGGGLVQPGGSLRLSCAASGFSFGTYSMNWVRQAPGKGLEWVATIDYDGSNTYYADSVKGRFTISRDNSKNTLYLQMNSLRAEDTAVYYCAKSGPGLRQVGFDYWGQGTLVTVSS

SEQ ID NO: 2297 - protein, 121 aa, Synthetic construct
QVQLQESGGGLVQPGRSLRLSCAASGFTFSTYAMNWVRQAPGKGLEWVSAISMSGESTYYADSVKGRFTISRDNSKNTLYLQMNSLRAEDTAVYYCAKDRRGSHADAFDVWGQGTLVTVSS

SEQ ID NO: 2298 - protein, 121 aa, Synthetic construct
QVQLQESGGGLVQPGRSLRLSCAASGFTFSTYAMTWVRQAPGKGLEWVSSISSSGESTYYADSVKGRFTISRDNSKNTLYLQMNSLRAEDTAVYYCAKDRRGSHADAFDVWGQGTLVTVSS

SEQ ID NO: 2299 - protein, 121 aa, Synthetic construct
QVQLQESGGGLVQPGRSLRLSCAASGFTFSTYAMAWVRQAPGKGLEWVSEISSSGSRTYYADSVKGRFTISRDNSKNTLYLQMNSLRAEDTAVYYCAKDRRGSHADAFDVWGQGTLVTVSS

SEQ ID NO: 2300 - protein, 119 aa, Synthetic construct
EVQLLESGGGLVQPGGSLRLSCAASGFTFNIYAMNWVRQAPGKGLEWVSVISGRGITTYYADSVKGRFTISRDNSKNTLYLQMNSLRADDTAVYYCAKGSSSWTDFDYWGQGTLVTVSS

SEQ ID NO: 2301 - protein, 119 aa, Synthetic construct
EVQLLESGGDLIQPGGSLRLSCAASGFTFNIYAMNWVRQAPGKGLEWVSVISGRGITTYYADSVKGRFTISRDNSKNTLYLQMDSLRAEDTAVYYCAKGSSYWTDFDYWGQGTLVTVSS

SEQ ID NO: 2302 - protein, 119 aa, Synthetic construct
EVQLLESGGGLVQPGGSLRLSCAASGFTFNIYAMNWVRQAPGKGLEWVSVISGSGVTTYYADSVKGRFTISRDNSKNTLYLQMNSLRAEDTAVYYCAKGSSWYVDFDYWGQGTLVTVSS

SEQ ID NO: 2303 - protein, 144 aa, Synthetic construct
EVQLVESGGGLVQPGRSLRLSCAASGFTFDDYAMNWVRQAPGKGLEWVATISFDGTDKYHADDVWGRFTISRDNSKKTLYLQMNSLRAEDTALYYCAKDLREDECEEWWSDYYDLGKQLPCRKSRGVAGVLDKWGLGTMVTVSS

SEQ ID NO: 2304 - protein, 144 aa, Synthetic construct
EVQLVESGGGLVQPGGSLRLSCEASGFTFNTYEMNWVRQPPGRGLEWVAGISFAATKTYYGGSVKGRFTVSRDISKNTLYLQMDGLRGEDTALYYCAKDLRELECEEWASDYYDFGRPQPCLDPRGVSGISNVWGQGTMVTVSS

SEQ ID NO: 2305 - protein, 141 aa, Synthetic construct
QVQLVESGGGVVQPGRSLRLSCAASNTYAMHWVRQAPGKGLEWMALISYEGSDKYYVDSVKGRFTISRDNSKSTLYLQMNSLSAEDTAVYFCAKDLGGNKDDEWTTDYYYDWSKARPVQDPRVVAGTFDIWGQGTMVTVSS

SEQ ID NO: 2306 - protein, 144 aa, Synthetic construct
QVQLVESGGGVVQAGRSLRLSCAASGFTFSTYAMHWVRQAPGKGLEWVAVISYDGSNKYYADSVRGRFTISRDNSKNTLYLQMNSLRAEDTALYYCAKDMREYECEEWTSDYYDFGRPQPCIDSRGVVGTFHVWGQGTMVTVSS

SEQ ID NO: 2307 - protein, 144 aa, Synthetic construct
EEQLVESGGGLVQPGRSLRLSCTGSGFRFGDYAMNWVRQAPGKGLEWVTFISYDGSNKHYADSVKGRFTVSRDNSKNTLHLQMNSLRPEDTALYFCARDLRESECEEWESYYYDFGKKGPCVKPRGVVGVLDIWGQGTLVTVSS

SEQ ID NO: 2308 - protein, 144 aa, Synthetic construct
EVQLVESGGGLVQPGGSLNVSCAASGFTFRTYAMHWVRQAPGKGLEWVAAISYDGDNKYSADSVKGRFTISRDQSKNTLYLQMNSVRVEDTARYYCARDMREYECELWASDYYDFGKPQPCEDPRGVVGTFDMWGLGTLVTVSS

SEQ ID NO: 2309 - protein, 144 aa, Synthetic construct
QVQLVESGGGVVQPGRSLRLSCAASGFTFSTYAMHWVRQAPGKGLEWVALISYDATNKYYVDSVKGRFTISRDNSKNTLYLQMSSLTAEDTAVYYCAKDLGGIKIDEWGTDYYDISVSYPVQDPRAVAGIFDVWGHGTMVSVSS

SEQ ID NO: 2310 - protein, 144 aa, Synthetic construct
EVHLVESGGGLVKPGGSLRLSCAASGFTFSTYSMNWVRQAPGKGLEWVAFVAFDESDKYYADSVKGRFTISRDNSKNTLSLQMNSLRVEDTAIYYCAKEVGDNKDDEWASDYYDLSIAYPIQDPRAVGRGYDIWGQGTMVTVSS

SEQ ID NO: 2311 - protein, 144 aa, Synthetic construct
QVQLVESGGGVVQPGRSLRLSCAASGFTFSTYAMHWVRQAPGRGLEWVALISYDGSNKYYVDSVKGRFTISRDNSKNTLYLQMNSLTAEDTAVYYCAKDLGGSKDDEWATDYYDLSIAYPIQDPRAVAGIFDVWGRGTVVTVSS

SEQ ID NO: 2312 - protein, 144 aa, Synthetic construct
QVQLVESGGGVVQPGRSLRLSCAASGFTFSTYAMHWVRQAPGKGLEWVALISYDGTNKYYVDSAKGRFTISRDNSKNTLYLQMNSLTPEDTAVFYCAKDLGGYKDDEWGTEYYDISVSYPVQDPRAVAGVFDVWGHGTMVTVSS

SEQ ID NO: 2313 - protein, 145 aa, Synthetic construct
QVQLVESGGGVVQPGRSLRLSCAASGFSFNNYAMNWVRQAPGKGLEWVAFVSSDGSNKNYADSVTGRFTLSRDNSKNTVFLQMNSLRVEDTAVYYCAKDVGANKDDEWTTNYYYDISIADPVPDPRAVIGAFDVWGQGTMVTVSS

SEQ ID NO: 2314 - protein, 144 aa, Synthetic construct
QVQLVESGGGVVQPGRSLRLSCAASGFTFNTYAMHWVRQAPGKGLEWVALISYDGTEKYYADSVKGRFTISRDNSRNTLYLQMNSLRLEDAALYQCAKDLGGSKSDEWGTDYYDMSISYPIQDPRAVAGVFDIWGQGTLVTVSS

SEQ ID NO: 2315 - protein, 144 aa, Synthetic construct
QAQLVESGGGVVQPGRSLVLSSVASGFSFSTYAMHWVRQAPGKGLEWVAVISYDGGNKYYADSVKGRFSISRDNSKNTVYLQINSLRAEDTAVYYCAKDLGANKDDEWATDYYDLSVAYPVPDPRAVVGAFDVWGQGTMVTVSS

SEQ ID NO: 2316 - protein, 144 aa, Synthetic construct
EVQLVESGGGLVKPGGSLRLSCAASGITFSTYEMNWVRQAPGKGMEWVAVISYDGSNKYYADSVKGRFTISRDNSKNTVYLQMNSLRGVDTAVYYCAKDLGGGEVEEWATDYYDWSIAYPVEHPRAVVGVFDIWGQGTKVTVSS

SEQ ID NO: 2317 - protein, 144 aa, Synthetic construct
QVQLVESGGGVVQPGRSLRLSCAASGFTFSTYAMHWVRQAPGKGLEWVALISYDGTNKYYVDSVKGRFTISRDNSKNTLYLQMNSLTAEDTAVYYCAKDLGGNKDDEWGTDYYDFSVAYPVQDPRAVSGIFDVWGHGTMVTVSS

SEQ ID NO: 2318 - protein, 144 aa, Synthetic construct
DVYLVESGGGLVQPGGSLRLSCTASGITFSTYEMNWVRQAPGKGLEWVAFVAFDGSDKYYADSVKGRFVISRDNSKNTLSLQMNSLRAEDTAVYYCAKEVGEDKDDEWASDYYDLSIAYPVHDPRAVVGGFDIWGQGTMVTVSS

SEQ ID NO: 2319 - protein, 144 aa, Synthetic construct
QVQLVESGGGVVQPGRSLRLSCAASGFTFSTYAMHWVRQAPGKGLEWVALISYDGTDKYYADSVKGRFTISRDNSKNTVYLQMNSLRGVDTAVYYCAKDLGGGEVEEWATDYYDWSTAYPVEHPRAVVGVFDIWGQGTKVTVSS

SEQ ID NO: 2320 - protein, 144 aa, Synthetic construct
EVQLVQSGGGLVKPGGSLRLSCAASGFTFSTYSMNWVRQAPGKGLEWVAVISSDGSSKNYADSVKGRFTISRDNSKNTVSLQMNSLRPEDTAVYYCAKDVGANKDDEWATDYYDLSIAYPVPDPRAVVGAFDIWGQGTMVTVSS

SEQ ID NO: 2321 - protein, 144 aa, Synthetic construct
QVQLVESGGGVVQPGRSLRLSCAASGFSFNTYAMHWVRQAPGKGLEWMALISYDGSNKYYVDSVKGRFTISRDNSKNTLYLQMNSLRAEDTAVYYCAKDLGGNKDDEWATDYYDLSIAYPVQDPRVVVGIFDIWGQGTMVTVSS

SEQ ID NO: 2322 - protein, 144 aa, Synthetic construct
QVQLVESGGGVVQPGRSLRLSCAASGFTFSTYAMHWVRQAPGKGLEWVVVISYDGSNKYYADSVKGRFTISRDNSKNTLFLQMNSLRAEDTALYYCAKDVGEYKSDEWATDYYDLSIAYPIQDPRAMVGAFDIWGQGTMVTVSS

SEQ ID NO: 2323 - protein, 144 aa, Synthetic construct
QVQLVESGGGVVQPGRSLRLSCAASGFTSSTYAMHWVRQAPGKGLEWVALISYDGTDKYYADSVKGRFTISRDNSKNTLYLQMNSLRVEDTAVYHCAKDLGGNKPDEWATDYYDLSIAYPVQDPRAVVGVFDIWGQGTIITVSS

SEQ ID NO: 2324 - protein, 144 aa, Synthetic construct
QVQLVESGGGVVQPGRSLRLSCAASGFTFSTYAMHWVRQAPGKGLEWVALISYDGTDKYYADSVKGRFTISRDNSKNTLYLQMNSLRVEDTAVYHCAKDLGGSKSDEWATDYYDWSIAYPVHDPRAVVGVFDIWGQGTLVTVSS

SEQ ID NO: 2325 - protein, 144 aa, Synthetic construct
QVQLVESGGGVVQPGRSLRLSCAASGFTFSTYAMHWVRQAPGKGLEWVALISYDGTDKYYADSVKGRFIISRDNSRSTLYLQMNSLRLEDTAVYHCAKDLGGSKSDEWATDYYDLSVAYPVQDPRAVVGVFDIWGQGTMVTVSS

SEQ ID NO: 2326 - protein, 144 aa, Synthetic construct
EVQLLESGGGLVQPGGSLRLSCAASGFTFSSYAMNWVRQAPGKGLEWVAVISYDGGDKYYADSVKGRFTISRDNSKNTLYLQMNSLRVEDTAVYYCVKDVGESENEEWASDYYDFGRDYPGQDTRAVVGAFDIWGQGTMVTVSS

SEQ ID NO: 2327 - protein, 144 aa, Synthetic construct
QVQLVESGGGVVQPGRSLRLSCAASGFTFSTYAMHWVRQAPGKGLEWVAVISYDGSHSYYAGSVKGRFTTSRDNSKNTLNLQMNSLRPEDTALYYCAKDLGESENEEWASDYYDFGRDYPGQDSRGVVGTFDVWGQGTMVTVSS

SEQ ID NO: 2328 - protein, 129 aa, Synthetic construct
QVQLVQSGGGVVQPGRSLRLSCVASGFTFSTYAMHWVRQAPGRGLEWVAVISYDGNYKYYADSVKGRFSISRDNSNNTLHLEMNTLRTEDTALYYCAKDSQLRSLLYFEWLSQGYFDPWGQGTLVTVSS

SEQ ID NO: 2329 - protein, 129 aa, Synthetic construct
QVQLVESGGGVVQPGRSLRLSCAASGFTFSTYAMHWVRQAPGKGLEWVAVISYDGNYKYYADSVKGRFTISRDNSKNTLYLQMNSLRAEDTAVYYCAKDSQLRSLLYFEWLSQGYFDPWGQGTLVTVSS

SEQ ID NO: 2330 - protein, 122 aa, Synthetic construct
QVQLVQSGSELKKPGASVKVSCKASGYTFTSYAMNWVRQAPGQGLEWMGWINTNTGNPTYAQGFTGRFVFSFDTSVSTAYLQICSLKAEDTAVYYCARKDQTLTYGNWFDPWGQGTLVTVSS

SEQ ID NO: 2331 - protein, 123 aa, Synthetic construct
DVQLVESGGGLVQPGGSLRLSCAASGLTFSTYAMGWFRQAPGKEREFVAAISWSGSRTYYADSVKGRFTISRDNSKNTVYLQMNSLRPEDTAVYYCAAYRRPRYSPTGTWDYWGQGTLVTVSS

SEQ ID NO: 2332 - protein, 118 aa, Synthetic construct
EVQLLESGGGLVQPGGSLRLSCAASGFTFSNYAMNWVRQAPGKGLEWVSGINYGGGSKYYADSVKGRFTISRDNSKNTLYLQMNSLRAEDTAVYYCAKDYGPFALDYWGQGTLVTVSS

SEQ ID NO: 2333 - protein, 121 aa, Synthetic construct
QVQLVQSGSELKKPGASVKVSCKASGYTFNTYAMNWVRQAPGQGLEWMGWINTNTGNPTYAQGFTGRFVFSLDTSVSTAYLQISSLKAEDTAVYYCARRYFDWLLGAFDIWGQGTMVTVSS

SEQ ID NO: 2334 - protein, 121 aa, Synthetic construct
EVQLLESGGGLVQPGGSLRLSCAASGFYFTDYAMNWVRQAPGKGLEWLGVISNKANAYTTEYSASVKGRFTISRDKSKNTLYLQMNSLRAEDTATYYCTRDRGLRFYFDYWGQGTTVTVSS

SEQ ID NO: 2335 - protein, 121 aa, Synthetic construct
EVQLLESGGGLVQPGGSLRLSCAASGFYFTDYAMNWVRQAPGKGLEWLGVISNKANAYTTEYSASVKGRFTISRDKSKNTLYLQMNSLRAEDTATYYCTRDRGIRFGFDYWGQGTTVTVSS

SEQ ID NO: 2336 - protein, 112 aa, Synthetic construct
EVQLVESGGGVVQPGRSLRLSCAASGFTFSTYAMHWVRQAPGKGLEWVAVISYDGTNKYYADSVKGRFTIFRDNSKNTLYLQMNSLRAEDTAVYYCGSGSYWGQGTLVTVSS

SEQ ID NO: 2337 - protein, 117 aa, Synthetic construct
EVQLVESGGDLVQPGGSLRLSCTASGFIFRNYAMNWVRQAPGKGLEWLSGILGSNDNTYYVDSVKGRFTISRDNSRNTLYLQMNSLRAEDSAVYYCAKGDAGGFDYWGQGTLVTVSS

SEQ ID NO: 2338 - protein, 120 aa, Synthetic construct
MSKVTVITGGTSGIGRGIVEKILANSAEDDLIFATYAHNAYKANEFWDNLKPEDQEKLIILKADMSSYDDMMNFVGEVKEKAGHVDWLISNAGISTYDKFQDYTDHLRMISSGKNQEKKW

SEQ ID NO: 2339 - protein, 118 aa, Synthetic construct
QVQLVESGGGVVQPGRSLRLSCAASGFTYSTYAMHWVRQAPGKGLEWVAFISYDGSNKYYADSVKGRFTISRDNSKNTLYLQMNSLRAEDTAVYYCARDFYHNWFDPWGQGTLVTVSS

SEQ ID NO: 2340 - protein, 127 aa, Synthetic construct
QVQLVESGGGVVQPGRSLRLSCAASGFTFSTYAMHWVRQAPGEGLEWVAVISYDGSNTYYADSVKGRFTISRDNSKNTLYLQMNSLRAEDTAVYYCARDPIWFGELLSPPFVHFDYWGQGTLVTVSS

SEQ ID NO: 2341 - protein, 125 aa, Synthetic construct
EVQLLESGGGLVQPGGSLRLSCAASGFTFSTYAMSWVRQAPGKGLEWVSTITGSGRDTYYADSVKGRFTISRDNSKNTLFLQLNSLRAEDAAVYSCANHPLASGDDYYHYYMDVWGKGTTVTVSS

SEQ ID NO: 2342 - protein, 126 aa, Synthetic construct
EVQLLESGGGLEQPGGSLRLSCAASGFTFSTYAMSWVRQAPGKGLEWVSAISGSGAGTFYADSVKGRFTISRDNSKNTLYLQMNSLRAEDTAVYYCARESDCGSTSCYQVGWFDPWGQGTLVTVSS

SEQ ID NO: 2343 - protein, 128 aa, Synthetic construct
EVQLVESGGGLVKPGGSLRLSCAASGFTFSTYNMNWVRQAPGKGLEWVSSITSSSSYIYYADSVKGRFTISRDNAENSLYLQMNSLRAEDTAVYYCARDRNRYDFWSGYYRLVGFDPWGQGTLVTVSS

SEQ ID NO: 2344 - protein, 117 aa, Synthetic construct
EVQLVESGGGLVKPGGSLRLSCAASGFTFSTYSMNWVRQAPGKGLEWVSSISSSSSYIYYADSVKGRFTISRDNAKNSLYLQMNSLRAEDTAVYYCARVVANWFDPWGQGTLVTVSS

SEQ ID NO: 2345 - protein, 130 aa, Synthetic construct
QVQLVESGGGVVQPGRSLRLSCAASGFTFRTYAMHWVRQAPGKGLEWVAVILSDGNNKYYADSVKGRFTISRDNSKNTLYLQMNSLRAEDTAIFYCAREQEANYYDISGYYHWGESLGYWGQGTLVTVPS

SEQ ID NO: 2346 - protein, 125 aa, Synthetic construct
EVQLLESGGGLVQPGGSLRLSCAASGFTFSTYAMSWVRQAPGKGLEWVSTITGSGGFTYYADSVKGRFTISRDNSKNTLFLQMNSLRAEDAAVYYCANHPLASGDEYYYYYMDVWGKGTTVTVSS

SEQ ID NO: 2347 - protein, 123 aa, Synthetic construct
QVQLVESGGGVVQPGRSLRLSCAASGFTFSTYAMHWVRQAPGKGLEWVAVISYDGTNKFYADSVKGRFTISRDNSKNTLYLQMNSLRAEDTAVFYCARDSDVDTAMVTWFDYWGQGTLVTVSS

SEQ ID NO: 2348 - protein, 129 aa, Synthetic construct
EVQLLESGGGLVQPGGSLRLSCTASGFTFSTYAMSWVRQAPGKGLEWVSAISDSGGSTYYADSVKGRFTISRDNSKNTLYLQMNSLRAEDTAVYYCAKSKTVERLPYCGGDCFSAIDYWGQGTLVTVSS

SEQ ID NO: 2349 - protein, 125 aa, Synthetic construct
EVQLVESGGGLVKPGGSLRLSCAASGFTFSTYSMNWVRQAPGKGLEWVSSISSSSNYIYYADSVKGRFTISRDNAKNSLYLQMNSLRAEDTAVYYCARAKLEIAHYGGSPGFDYWGQGTLVTVSS

SEQ ID NO: 2350 - protein, 123 aa, Synthetic construct
EVQLLESGGGLVQPGGSLRLSCAASGFTFSTYAMTWVRQAPGKGLEWVSAISGSGGRTYYADSVKGRFTISRDNSKNTLYLQMNSLRAEDTAVYYCAKVDYGEYVFSNAFDIWGQGTMVSVSS

SEQ ID NO: 2351 - protein, 129 aa, Synthetic construct
EVQLVESGGGLVQPGRSLRLSCTASGFTFGDYAMNWFRQAPGKGLEWVGFIRSKAYGGTTEYAASVRGRFTISRDDSESIAYLQMNSLKTEDTAVYYCTRDLSYYYDSSGRGSHLFDYWGQGTLVTVSS

SEQ ID NO: 2352 - protein, 127 aa, Synthetic construct
QVQLVESGGGLVQPGRSLRLSCAASGFTFSTYAMHWVRQAPGKGLKWVAVISYDGGNKYYADSVKGRFTISRDNSKNTLYLQMNSLRAEDTAVYYCARDPIWFGELLSPPFVHFDYWGQGTLVTVSS

SEQ ID NO: 2353 - protein, 122 aa, Synthetic construct
EVQLVESGGGLVKPGGSLRLSCAASGFTFSTYAMSWVRQAPGKGLEWVATISDAGSYSYYPDNVKGRFTISRDNAKNSLYLQMNSLRAEDTAVYYCARRGSRYEEYYVMDYWGQGTTVTVSS

SEQ ID NO: 2354 - protein, 122 aa, Synthetic construct
EVQLVESGGGLVKPGGSLKLSCAASGFTFSTYAMSWVRQTPEKRLEWVATISDGGSYSYYPDNVKGRFTISRDNAKNNLYLQMSHLKSEDTAMYYCARRGSRYEEYYVMDYWGQGTSVTVSS

SEQ ID NO: 2355 - protein, 123 aa, Synthetic construct
EVQLVESGGGLVQPGGSLRLSCAASGFSFSTYWMNWVRQAPGKGLEWVANIKQDGSEKYYVDSVKGRFTISRDNAKNSLYLQMNSLRAEDTAVYYCARDISSSWFYYYGMDVWGQGTTVTVSS

SEQ ID NO: 2356 - protein, 123 aa, Synthetic construct
EVQLVESGGDLVQPGGSLRLSCKASGFTFSTFAMNWVRQAPGRGLEWVSAIGASGYSTYYVDSMKGRFTISRDNSKNTLYLQMNSLGAEDTAVYYCAKEYSVSSNYYYGMDVWGQGTTVTVSS

SEQ ID NO: 2357 - protein, 122 aa, Synthetic construct
EVQLVESGGDLVQPGGSLRLSCAASGFTFNTYAMNWVRQAPGKGLEWVAVIGGSGYSTNYADSVKGRFTISRDNSKNTLYLQMNSLRTEDTAVYYCAKEGNIVALYWYFDLWGRGTLVTVSS

SEQ ID NO: 2358 - protein, 123 aa, Synthetic construct
QVQLKQSGPGLVQPSQSLSITCTVSGFSLTSYGVHWVRQSPGKGLEWLGVIWSGGDTDYNAAFISRLSISKDNSKSQLFFKMNSLRATDTAIYYCARNRGDIYYDFTYAMDYWGQGTSVTVSS

SEQ ID NO: 2359 - protein, 113 aa, Synthetic construct
EVQLLESGGGLVQPGGSLRLSCAASGFTFSSYAMNWVRQAPGKGLEWVSAILSSGGSTYYADSVKGRFTISRDNSKNTLYLQMNSLRAEDTAVYYCARYWPMDIWGQGTLVTV

SEQ ID NO: 2360 - protein, 120 aa, Synthetic construct
QVQLVQSGSELKKPGASVKVSCKASGYTFTSYAMNWVRQAPGQGLEWMGWINTNTGNPTYAQGFTGRFVFSLDTSVSTAYLQISSLKADDTAVYYCAREDSNGYKIFDYWGQGSLVTVSS

SEQ ID NO: 2361 - protein, 105 aa, Synthetic construct
QSVLTQDPAVSGQTVKITCQGDSLRSYLASWYQQKPGQAPTLVTYARNDRPAGVPDRFSGSKSGTSASLAISGLQSEDEADYYCAAWDDSLNGYLFGAGTKLTVL

SEQ ID NO: 2362 - protein, 121 aa, Synthetic construct
EVMLVESGGGLVKPGGSLKLSCAASGFTFSTYAMSWVRQTPEKRLEWVATITSGGSYTYYPDSVKGRFTISRDNAKNILYLQMSSLRSEDTAMYYCTRLRQIGLRGFSDYWGQGTTLTVSS

SEQ ID NO: 2363 - protein, 126 aa, Synthetic construct
VQLLESGGGLVGINPGGSLRLSCTASGFTFSSYAMNWVRQAPGKGLEWVSAISGSGGTTFYADSVKGRFTISRDNSRTTLYLQMNSLRAEDTAVYYCAKDLGWSDSYYYYYGMDVWGQGTTVTVSS

SEQ ID NO: 2364 - protein, 118 aa, Synthetic construct
EVKLVESGGGLVKPGGSLKLSCAASGFTFRTYAMSWVRQTPEKRLEWVASISSRGRIYYPDSVKGRFTISRDNARNILYLQMSSLRSEDTAMYYCARDGDYGSSYDYWGQGTTLTVSS

SEQ ID NO: 2365 - protein, 117 aa, Synthetic construct
QVQLVQSGGGLVQPGGSLRLSCAASGFSFSTYAMSWVRQAPGKGLEWVSGISGSGGATHYADSVKGRFTISRDNSKNTVNLQMNSLRAEDTAVYYCAKGLWFGEGYWGQGTLVTVSS

SEQ ID NO: 2366 - protein, 117 aa, Synthetic construct
QVQLVQSGGGLVQPGGSLRLSCAASGFSFSTYAMSWVRQAPGKGLEWVSGISGSGGATHYADSVKGRFTISRDNSKNTVNLQMNSLRAEDTAVYYCAKGLWFGEGLWGQGTLVTVSS

SEQ ID NO: 2367 - protein, 117 aa, Synthetic construct
QVQLVQSGGGLVQPGGSLRLSCAASGFSFSTYAMSWVRQAPGKGLEWVSGISGSGGATHYADSVKGRFTISRDNSKNTVNLQMNSLRAEDTAVYYCAKGLWFGEGIWGQGTLVTVSS

SEQ ID NO: 2368 - protein, 117 aa, Synthetic construct
QVQLVQSGGGLVQPGGSLRLSCAASGFTFSTYAMSWVRQAPGKGLEWVSGINGSGGATHYADSVKGRFTISRDNSKNTVNLQMNSLRAEDTAVYYCAKGLWFGEGYWGQGTLVTVSS

SEQ ID NO: 2369 - protein, 117 aa, Synthetic construct
QVQLVQSGGGLVQPGGSLRLSCAASGFTFSTYAMSWVRQAPGKGLEWVSGINGSGGATHYADSVKGRFTISRDNSKNTVNLQMNSLRAEDTAVYYCAKGLWFGEGLWGQGTLVTVSS

SEQ ID NO: 2370 - protein, 117 aa, Synthetic construct
QVQLVQSGGGLVQPGGSLRLSCAASGFSFSTYAMSWVRQAPGKGLEWVSGISGSSGATHYADSVKGRFTISRDNSKNTVNLQMNSLRAEDTAVYYCAKGLWFGEGYWGQGTLVTVSS

SEQ ID NO: 2371 - protein, 117 aa, Synthetic construct
QVQLVQSGGGLVQPGGSLRLSCAASGFSFSTYAMSWVRQAPGKGLEWVSGISGSSGATHYADSVKGRFTISRDNSKNTVNLQMNSLRAEDTAVYYCAKGLWFGEGLWGQGTLVTVSS

SEQ ID NO: 2372 - protein, 117 aa, Synthetic construct
QVQLVQSGGGLVQPGGSLRLSCAASRFSFSTYAMSWVRQAPGKGLEWVSGISGSGQATHYADSVKGRFTISRDNSKNTVNLQMNSLRAEDTAVYYCAKGLWFGEGYWGQGTLVTVSS

SEQ ID NO: 2373 - protein, 117 aa, Synthetic construct
QVQLVQSGGGLVQPGGSLRLSCAASGFSFSTYAMSWVRQAPGKGLEWVSGISGSGGTTHYADSVKGRFTISRDNSKNTVNLQMNSLRAEDTAVYYCAKGLWFGEGYWGQGTLVTVSS

SEQ ID NO: 2374 - protein, 117 aa, Synthetic construct
QVQLVQSGGGLVQPGGSLRLSCAASGFSFSTYAMSWVRQAPGKGLEWVSGISGSGGTTHYADSVKGRFTISRDNSKNTVNLQMNSLRAEDTAVYYCAKGLWFGEGLWGQGTLVTVSS

SEQ ID NO: 2375 - protein, 116 aa, Synthetic construct
QVQLQESGGGLVQPGGSLRLSCSASGFTFGTYAMRWVRQTSGKGLEWVSGIGVSGDAYYTDSVRGRFTISRDNSKNTLYLQMNTLRAEDTAYYCTRKSSTTSNDYWGRGTLVTVSS

SEQ ID NO: 2376 - protein, 124 aa, Synthetic construct
EVQLVQSGAEVKKPGSSVKVSCKASGGTFKTYAINWVRQAPGQGLEWMGGIIPVLGTANYVQKFQGRVTITADESTTTAYMELRGLRSEDTAVYYCARGEGSGWYDHYYGLDVWGQGTLVTVSS

SEQ ID NO: 2377 - protein, 121 aa, Synthetic construct
QVQLVQSGAEVKKPGSSVKVSCKASGGTFSTYAINWVRQAPGQGLEWMGRIIPILGTANYAQKFQGRVTITADKSTSTAYMELSSLRSEDTAVYYCARRGGEGAAHGMDVWGQGTTVTVSS

SEQ ID NO: 2378 - protein, 120 aa, Synthetic construct
EVQLLESGGGLVQPGESLKLSCAASGFTFSSYAMNWVRQAPGKGLEWVSGISGSGGSTYYADSVKGRFTVSRDNSKNTLYLQMNSLRAEDTAVYYCAKDNNYYYYGMDVWGQGTTVTVSS

SEQ ID NO: 2379 - protein, 125 aa, Synthetic construct
EVQLVESGGGLVQPGGSLRLSCAASGFTFSSYAMNWVRQAPGKGLEWVSAVSGSADITNYADSVKGRFTISRDNSKHTLYLQMNSLRAEDTAVYYCAKDKVYNWNYGIYYGMDVWGQGTTVTVSS

SEQ ID NO: 2380 - protein, 121 aa, Synthetic construct
QVQLVQSGAEVKKPGSSVKVSCKASGGTFNTYAINWVRQAPGQGLEWMGGIIPIFDTANYAQRFQGRVTITADKSTSTAYMELSSLRSEDTAVYFCAKDQTGYSSTLFDYWGQGTLVTVSS

SEQ ID NO: 2381 - protein, 121 aa, Synthetic construct
EVQLVQSGAEVKKPGSSVRVSCKASGGTFNTYAINWVRQAPGQGLEWVGRIIPIFDTANYAQKFQGRVTISADKSTTTAYMELSSLRSEDTAVFYCAKDETGYSSSNFQHWGQGTLVTVSS

SEQ ID NO: 2382 - protein, 121 aa, Synthetic construct
QVQLVQSGAEVKKPGSSVRVSCKASGGTFNTYAINWVRQAPGQGLEWVGRIIPIFDTANYAQKFQGRVTISADKSTTTAYMELSSLRSEDTAVFYCAKDETGYSSSNFQHWGQGTLVTVSS

SEQ ID NO: 2383 - protein, 121 aa, Synthetic construct
QVQLVQSGAEVKKPGSSVRVSCKASGGTFNTYAINWVRQAPGQGLEWVGRIIPIFGTANYAQKFQGRVTISADKSTTTAYMELSSLRSEDTAVFYCAKDETGYSSSNFQHWGQGTLVTVSS

SEQ ID NO: 2384 - protein, 121 aa, Synthetic construct
QVQLVQSGAEVKKPGSSVRVSCKASGGTFNTYAINWVRQAPGQGLEWVGRIIPIFGTANYAQKFQGRVTISADKSTTTAYMELSSLRSEDTAVFYCAKDETGYSSSNFQHWGRGTLVTVSS

SEQ ID NO: 2385 - protein, 121 aa, Synthetic construct
QVQLVQSGAEVKKPGSSVRVSCKASGGTFNTYAINWVRQAPGQGLEWVGRIIPIFDTANYAQKFQGRVTISADKSTTTAYMELSSLRSEDTAVFYCAKDETGYSSSNFQHWGRGTLVTVSS

SEQ ID NO: 2386 - protein, 122 aa, Synthetic construct
QVQLQESGGDLVKPGGSLRLSCAASGFTFNTYTMNWVRQAPGKGLEWLSSISSRSNYINYADSVKGRFTISRDNAKNSLYLQMNSLRAEDTAVYYCARFGRKGDLNWVFDYWGQGTLVTVSS

SEQ ID NO: 2387 - protein, 122 aa, Synthetic construct
EVQLLESGGGLVQPGGSLRLSCAASGFTFSSYAMNWVRQAPGKGLEWVSTISGSGGSTYYADSVKGRFTISRDNSKNTLYLQMNSLRAEDTAVFYCAIDPEYYDILTGGDYWGQGTLVTVSS

SEQ ID NO: 2388 - protein, 126 aa, Synthetic construct
QVQLVESGGGLVQAGGSLKLSCAASGRTFITYAMGWFRQAPGKERELVAAISWSGSSTYSADSVKGRFTISRDNAKNTVYLQMNSLKPEDTAVYYCAAEVSARTGEHLPKLMGDYWGQGTQVTVSS

SEQ ID NO: 2389 - protein, 120 aa, Synthetic construct
QVQLVQSGSELKKPGASVKVSCKASGYTFTTYAMNWVRQAPGQGLEWMGWIHTNTGNPTYAQGFTGRFVFSLDTSVSTAYLQISSLQAEDTAVYYCVRTEYSYGYVFYYWGQGTLVTVSS

SEQ ID NO: 2390 - protein, 116 aa, Synthetic construct
QVQLVQSGSELKKPGASVKVSCKASGYTFTRYAMNWVRQAPGQGLEWMGWINTITGNPTYAQGFTGRFVFSLDTSVSTAYLQISSLKAEDTAVYFCARGWDFFDSWGQGTLVTVSS

SEQ ID NO: 2391 - protein, 122 aa, Synthetic construct
EVQLVQSGAEVKKPGSSVKVSCKASGGTFSSYAMNWVRQAPGQGLEWMGWINTNTGNPTYAQGFTGRFVFSLDTSVSTAYLQISGLKAEDTAVYFCTRGYSSIWHGENFQYWGQGTLVTVSS

SEQ ID NO: 2392 - protein, 125 aa, Synthetic construct
QVQLVQSGSELKKPGASVKVSCKASGYTFTSYAMNWVRQAPGQGLEWMGWINTNTGNPTYAQGFTGRFVFSLDTSVSTAYLQISSLKAEDTAVYYCATDRGYISSWVFAEDFQHWGQGTLVTVSS

SEQ ID NO: 2393 - protein, 125 aa, Synthetic construct
QVQLVQSGSELKKPGASVKVSCTASGYTFTSYAMNWVRQAPGQRLEWMACVNPNTGSPTYAQGSTGRFVVSLDTSVSTAYLQISSLKAEDTAVYYCARDRKYVTNWVFAEDFQHWGHGTLVTVSS

SEQ ID NO: 2394 - protein, 125 aa, Synthetic construct
QVQLVQSGSELKKPGASVKVSCKASGYTFTNYAMNWVRQAPGQGLEWMGWMNPNTGNPTYAQGSTGRFVVSLDTSVSTAYLQISSLKAEDTAVYYCARDRKYVTNWVFAEDFQHWGRGTLVTVSS

SEQ ID NO: 2395 - protein, 123 aa, Synthetic construct
QVQLLQSGGGLVQPGGSLRLSCAASGFTFSTYAMSWVRQAPGKGLEWVSTIGPSGSSTYYAYADSVKGRFTISRDNYKNMLYLQMNSLRAEDTAVYYCAKEGPNSGYFDFDYWGQGTLVTVSS

SEQ ID NO: 2396 - protein, 126 aa, Synthetic construct
EVQVLESGGGLVQPGGSLRLSCAASGFTFSNYAMNWVRQAPGKGLEWVSAISGGGGSTYYADSVKGRATISRDNSENTLYLQMNSLRAEDTAVYYCAKTSSGWYDSYYDYYGLDVWGQGTTVTVSS

SEQ ID NO: 2397 - protein, 126 aa, Synthetic construct
EVQLLESGGGLVQPGGSLRLSCAASGFTFSNYAMNWVRQAPGKGLEWVSAISGGGGSTYYADSVKGRFTISRDNSKNTLYLQMNSLRAEDTAVYYCAKESITMVRGVMDYYGMDVWGQGTTVTVSS

SEQ ID NO: 2398 - protein, 119 aa, Synthetic construct
EVQVLESGGGLVQPGESLRLSCAASGFTFNTYAMSWVRQAPGKGLEWVSAISDNGGGTYNADSVKGRFTISRDNSKNTLYLQMNSLRAEDTAVYYCAKGEQWGAPFDYWGQGTLVTVSS

SEQ ID NO: 2399 - protein, 125 aa, Synthetic construct
EVQLVESGGGLVQPGGSLRLSCAASGFAFSTYAMSWVRQAPGKGLEWVSAITGSGYSTYYADSVKGRFTISGDNSKNTLYLQMNSLRAEDTALYYCAKVGEYYDFWSGYSPFDSWGQGTLVTVSS

SEQ ID NO: 2400 - protein, 122 aa, Synthetic construct
EVQLLESGGGLVQPGGSLRLSCAASGFTFSSYAMNWVRQAPGKGLEWVSTISGSGSSTYYADSVEGRFTISRDNSKNTLYLQMNSLRAEDTAIYYCAKEPRDMYIQQWLDSWGQGTLVTVSS

SEQ ID NO: 2401 - protein, 133 aa, Synthetic construct
EVQLLESGGGLVQPGGSLRLSCAASGFTFSSYAMNWVRQAPGKGLEWVSGISGSGESTYYADSVKGRFTISRDSSKNTVYLQMNSLRADDTAVYYCAKDQGYGVVVPAATRALPPRRYGMDVWGQGTTVTVSS

SEQ ID NO: 2402 - protein, 109 aa, Synthetic construct
QSVLTQPRSVSGSPGQSVTISCTGSSSDIGSYNYVSWYQQHPGKAPKLMLYDVSKRPSGVPDRFSGSKSVKTASLTISGLQAEDEADYYCCTYAGNSVVFGGGTKLTVL

SEQ ID NO: 2403 - protein, 125 aa, Synthetic construct
EVQLVESGGGLIQPGGSLRLSCAASGFTFSTYEMNWVRQAPGKGLEWVSSISTSGSTKDYAGSVKGRFTVSRDNAKNSLYLQMNSLRAEDTAIYYCARVYYYDSSGYYLALFDYWGQGTLVTVSS

SEQ ID NO: 2404 - protein, 123 aa, Synthetic construct
EVQLVESGGGLVQPGGSLRLSCAASGFSFSTYAMSWVRQAPGKGLEWVSAISGGGGSTYYADSVKGRFTISRDNSKNTLYLQVNSLRAEDTAVYYCARGGYCSSDSCYPFDFWGQGTLVTVSS

SEQ ID NO: 2405 - protein, 131 aa, Synthetic construct
EVQLVESGGGLVQPGGSLRLSCIVSGFPFNTYAMSWVRQAPGKGLEWVSVVSASGGNTDYADSVKGRFTISRDNSKKTLYLQMNSLRAEDTAVYYCARTESNTLAPSWSGRYVTDWYFDLWGRGTLVTVSS

SEQ ID NO: 2406 - protein, 118 aa, Synthetic construct
EVQLVETGGGLVQPGRSLRLSCTASGFTFGDYAMNWVRQAPGKGLEWIGIIRTKTYGGTTEYAASVKGRFTISRDDSKGIAYLQMNSLKTEDTGVYYCTMPVLNMDVWGQGTTVTVSS

SEQ ID NO: 2407 - protein, 121 aa, Synthetic construct
EVQLVESGGGLVKPGGSLRLSCAASGFSFSSYAMNWVRQAPGKGLQWVSSISAGSSYIDYADSVKGRFTISRDNAENSLFLQMNSLRVEDTAVYYCARVGSYTHGYEFDYWGQGTLVTVSS

SEQ ID NO: 2408 - protein, 134 aa, Synthetic construct
EVQLVESGGGLVKPGGSLRLSCAASGFMFSTYSMNWVRQAPGKGLEWVSFITGSSSDKYYAHSVKGRFTISRDNAKRTLYLQLNSLRAEDTAVYYCARFRGLYCDGDCSSRGNTYYNYYGMDVWGQGTTVTVSS

SEQ ID NO: 2409 - protein, 129 aa, Synthetic construct
EVQLLESGGGLVQPGRSLRLSCTGSGFTFGDYAMNWVRQAPGKGLEWVGLIRSKDYGGTTEFAASLKGRLTISRDDSKSIAYLQMHSLKTEDSAVYYCTRAHLTDYTDINGYQYYFDYWGQGSPVTVSS

SEQ ID NO: 2410 - protein, 123 aa, Synthetic construct
EVQLVESGGGLVQPGGSLRLSCAASGFTFSTYGMNWVRQAPGKGLEWVSYIGGSGRIIYYADSVKGRFTISRDNAKNSLYLQMNSLRAEDTAVYYCARDQHIVLVTGSTPDYWGQGTLVTVSS

SEQ ID NO: 2411 - protein, 129 aa, Synthetic construct
EVQLVESGGGLVKPGGSLRLSCAASGFTFGTYTMNWVRQAPGKGLEWVSSISSSSSHIYYADSVKGRFTISRDNARKALYLQMNSLRPEDTAVYFCARFLGDYGGDGNTYYYYYGMDVWGQGTTVTVSS

SEQ ID NO: 2412 - protein, 122 aa, Synthetic construct
EVQLLESGGGLVQPGGSLRLSCAASGFTYYSYAMNWVRQAPGKGLEWVSAISGGGDNTFYAESVKGRFTISRDNAKNTLYLQMDSLRAEDTAVYYCAKDLQGYTSLYCFDYWGQGTLVTVSS

SEQ ID NO: 2413 - protein, 124 aa, Synthetic construct
EVQLLESGGGLVQPGGSLRLSCAASGFTFSTYAMNWVRQAPGKGLEWVSTISGSGGSTYYGDSVKGRFTISRDNSKNTLYLQMNSLRAEDTAVYYCAKAPTPWCSGGSCYVSYWGQGTLVTVSS

SEQ ID NO: 2414 - protein, 130 aa, Synthetic construct
QVQLVESGGGLVKPGGSLRLSCAASGFTFSTYTMNWVRQAPGKGLEWVSSISGSSAYIYYADSVKGRFTISRDNAKNSLFLQMNSLRAEDTAVYYCARLQGLVLPAVMPSYYYYSGMDVWGQGTTVTVSS

SEQ ID NO: 2415 - protein, 125 aa, Synthetic construct
EVQLLESGGGLVKPGGSLRLSCAASGFIFSDYAMNWVRQTPGKGLEWVSSISDSSAYKYYTGSVSGRFTISRDNAKNSLYLQMNDLRPEDTAVFYCARGQWRCSGASCYSPFDSWGQGTLVTVSS

SEQ ID NO: 2416 - protein, 119 aa, Synthetic construct
QVQLVQSGGGLVQPGGSLRLACAASGFTLSGYAMNWVRQAPGKGLEWVSSISGSGGSTYYADSVKGRFTTSRDNSKNTVFLHMNSLRAEDTAIYYCATVPWETGPFDHWGQGTLVTVSS

SEQ ID NO: 2417 - protein, 126 aa, Synthetic construct
EVQLVESGSELKKPGASVKVSCKASGYTFRTYVMNWVRQAPGQGLEWMGWINTNTGNPTYAQGFTGRFVFSLDTSVSTAYLQISSLKAEDTAVYYCARESIDDYDSSGYGRTFDYWGQGTLVTVSS

SEQ ID NO: 2418 - protein, 122 aa, Synthetic construct
QVQLVQSGAEVKKPGESLKISCKGPGYSFTTYWIGWVRQMPGKGLEWMGIIYPGDSDTKYSPSFQGQVTITADKSIATAYLQWSRLKASDTAVYYCATVVTYADNIRWFDSWGQGTLVTVSS

SEQ ID NO: 2419 - protein, 124 aa, Synthetic construct
EVQLVESGGGLVQPGGSLRLSCADSDFTFSTYSMNWVRQAPGKGLEWISYITGRSSAIYYADSVKGRFTISRDNAKNSLFLQMNSLRAEDTAVYYCTTFMAGYSFGHGDAFDIWGQGTTVTVSS

SEQ ID NO: 2420 - protein, 123 aa, Synthetic construct
EVQLVESGGGLVQPGGSLRLSCAASGFTFSKYAMNWVRQAPGKGLEWVSSISDSGDSRYYADSVKGRFTISRDSSKNTLNLQMNSLRAEDTAVYYCAKAGWELFSPQGAFDLWGQGTMVTVSS

SEQ ID NO: 2421 - protein, 127 aa, Synthetic construct
EVQLLESGGGLVQPGGSLRLSCAASRFTFSTYAMSWVRQAPGKGLEWVSSISGSGDKTFYTDSVKGRFTISRDNSKNTLYLQMNSLRAEDTAVYYCARESYYELWTGTYPGWELDYWGQGTLVTVSS

SEQ ID NO: 2422 - protein, 129 aa, Synthetic construct
EVQLLESGGGLVQPGGSLRLSCAASGFTFSSYAMNWVRQAPGKGLEWVSIISDSGGSTYYADSVKGRFTISRDNSKNTLYLQMNSLRAEDTAVYYCAKATPLKWELLIGSTPGYYFDYWGQGTTVTVSS

SEQ ID NO: 2423 - protein, 118 aa, Synthetic construct
QVQLVQSGSELKKPGASVKVSCKASGYTFTSYAMNWVRQAPGQGLEWMGWINTNTGNPTYAQGFTGRFVFSLDTSVSTAYLQISSLKAEDTAVYYCAAYGIHDAFDIWGQGTMVTVSS

SEQ ID NO: 2424 - protein, 140 aa, Synthetic construct
MDMRVPAQLLGLLLLWLRGARCQVQLVQSGAEVKKPGSSVKVSCKASGYTFTSYHIHWVRQAPGQGLEWIGWIYPGNVNTEYNEKFKGKATITADESTNTAYMELSSLRSEDTAVYYCAREEITYAMDYWGQGTLVTVSS

SEQ ID NO: 2425 - protein, 140 aa, Synthetic construct
MDMRVPAQLLGLLLLWLRGARCQVQLVQSGAEVKKPGSSVKVSCKASGYTFTSYHMHWVRQAPGQGLEWIGYIYPGNVNTEYNEKFKGKATLTADKSTNTAYMELSSLRSEDTAVYFCAREEITYAMDYWGQGTLVTVSS

SEQ ID NO: 2426 - protein, 125 aa, Synthetic construct
EVQLVESGGGLVQPGGSLRLSCAASGFTFSSYAMNWVRQAPGKGLEWVSAISGSGRSTYYADSVKGRFTISRDNSKNTLYLQMNSLRAEDTAVYYCAKDSTYYYTSGSYSVFDYWGQGTLVTVSS

SEQ ID NO: 2427 - protein, 121 aa, Synthetic construct
QVQLVQSGAEVRKPGSSVMVSCKASGGTFNTYAINWVRQAPGQGLEWMGGIIPIFGTPYYGQRFQGRVTITADKSTNTVFMELSSLRSEDTAMYFCARERDIGSLYYFDSWGQGTLVTVSS

SEQ ID NO: 2428 - protein, 125 aa, Synthetic construct
EVQLVESGGGLVQPGGSLRLSCAASGFTFSSYAMNWVRQAPGKGLEWVSTISGSGVSTYYADSVKGRFTISRDNSKNTLYLQMNTLRAEDTAVYYCAKDRGYDYSGSYHNWFDPWGQGTLVTVSS

SEQ ID NO: 2429 - protein, 121 aa, Synthetic construct
QVQLVQSGAEVKKPGSSVKVSCKASGDTFSTYAINWIRQAPGQGLEWMGGIIPIFGTAYYAQEFQDRVTITADKSTSTGYMEMSSLISEDTAVYYCARERELGALYAFDIWGQGTMVTVSS

SEQ ID NO: 2430 - protein, 121 aa, Synthetic construct
QVQLVQSGAEVRKPGSSVMVSCKASGGTFSTYAINWLRQAPGQGLEWMGGIIPIFGTPYYGQRFQGRVTITADKSTNTVFMELSSLRSEDTAIYYCARDRDSGGLYYFDSWGQGTLVTVSS

SEQ ID NO: 2431 - protein, 118 aa, Synthetic construct
QVQLVQSGSELKKPGASVKVSCKASGYTFTSYAMNWVRQAPGQGLEWMGWINTNTGNPTYAQGFTGRFVFSLDTSVSTAYLQISSLKAEDTAVYYCARPQGGSSWYRDYYYGMDVWGQ

SEQ ID NO: 2432 - protein, 126 aa, Synthetic construct
EVQLVESGGGLVQAGGSLRLSCATSGRTFNTYAMGWFRQAPGKEREFVASVSWRYDRTYYTDTVKGRFTISRDNAKNTVYLQMNSLKPEDTAVYFCAADTNWRAGPRVGIDEYAYWGQGTLVTVSS

SEQ ID NO: 2433 - protein, 119 aa, Synthetic construct
QVQLVQSGAEVKKPGASVKVSCKASGYTFTDYAMNWVRQAPGQGLEWMGVISTFSGNTNFNQKFKGRVTMTTDTSTSTAYMELRSLRSDDTAVYYCARSDYYGPYFDYWGQGTTLTVSS

SEQ ID NO: 2434 - protein, 119 aa, Synthetic construct
QVQLQQSGPELVRPGVSVKISCKGSGYRFTDYAMNWVKQSHAKSLEWIGVISTFSGNTNFNQKFKGKATMTVDKSSSTAYMELARLTSEDSAMYYCARSDYYGPYFDYWGQGTTLTVSS

SEQ ID NO: 2435 - protein, 122 aa, Synthetic construct
QVQLVQSGAEVKKPGASVKVSCKASGYTFTTYYMNWVRQAPGQGLEWMGILSPSGGGTSYAPKFQGRVTMTRDTSTSTVYMELSSLRSEDTAVYYCARATYYDFWSGSLDYWGQGTLVTVSS

SEQ ID NO: 2436 - protein, 124 aa, Synthetic construct
EVQLLESGGGLVQPGGSLRLSCAASGFTFINYAMNWVRLTPGKGLEWVSVISGSGSGTYYADSVKGRFTVSRDNSKNTLYLQMNSLRVEDTAIYYCASPPPMVRGVIITIGNYWGQGALVTVSS

SEQ ID NO: 2437 - protein, 124 aa, Synthetic construct
EVQLLESGGGLVQPGGSLRLSCAASGFTFTNYAMNWVRLAPGKGLEWVSVISGSGSGTYYADSVKGRFTVSRDNSKNTLYLQMNSLRVEDTAIYYCASPPPMVRGVIITIGNYWGQGALVTVSS

SEQ ID NO: 2438 - protein, 121 aa, Synthetic construct
EVQLLESGGGLVQPGESLRLSCAASGLTFSDYAMNWVRQAPGKGLYWVSSISGTGGSTYYADSLKGRFTISRDNSKNTLYLQMNSLRAEDTAVYYCAKDIAVGVTAYFDHWGQGTLVTVSS

SEQ ID NO: 2439 - protein, 121 aa, Synthetic construct
EVQLLESGGGLVQPGGSLRLSCAASGFTFSSYAMNWVRQAPGKGLEWVSAISGSGGSTYYADSVKGRFTISRDNSKNTLYLQMNSLRAEDTAVYYCAKDFAVGATTSFDYWGQGSLVTVSS

SEQ ID NO: 2440 - protein, 120 aa, Synthetic construct
EVQLVESGGGLVQPKGSLKLSCAASGFSFNTYAMNWVRQAPGKGLEWIAHIRSKSNNFATYYADSVKDRFSISRDASENILFLQMNNLKTEDTAMYYCVRQGGDFPMDYWGQGTSVTVSS

SEQ ID NO: 2441 - protein, 125 aa, Synthetic construct
EVQLVESGGGLVQPGGSLRLSCAASGFTFNTYAMNWVRQAPGKGLEWVARIRSKYNNYATYYADSVKSRFTISRDDSKNTLYLQMNSLRAEDTAVYYCVRHGNFGNSYVSWFAYWGQGTTVTVSS

SEQ ID NO: 2442 - protein, 125 aa, Synthetic construct
EVQLVESGGGLVQPGGSLRLSCAASGFTFNTYAMNWVRQAPGKGLEWVARIRSKYNNYATYYADSVKSRFTISRDDSKNTLYLQMNSLRAEDTAVYYCVRHGNFGNSYVSYFAYWGQGTTVTVSS

SEQ ID NO: 2443 - protein, 125 aa, Synthetic construct
EVQLVESGGGLVQPGGSLRLSCAASGFTFNTYAMNWVRQAPGKGLEWVARIRSKYNNYATYYADSVKSRFTISRDDSKNTLYLQMNSLRAEDTAVYYCVRHGNFGNSYVSFFAYWGQGTTVTVSS

SEQ ID NO: 2444 - protein, 123 aa, Synthetic construct
QVQLVQSGSELKKPGASVKVSCKASGYTFTSYAMNWVRQAPGQGLEWMGWINTNTGNPTYAQGFTGRFVFSLDTSVSTAYLQISSLKAEDTAVYYCARETYYYDRGGYPFDPWGQGTLVTVSS

SEQ ID NO: 2445 - protein, 123 aa, Synthetic construct
QVQLMQSGSELKKPGASVKVSCKASGYTFTTYSMNWVRQAPGQGLEWMGWINTNTGNPTYAQDFTGRFVFSLDTSVSTAYLQISSLKAEDTAVYYCARETYYYDSSGYPFDPWGQGTLVTVSS

SEQ ID NO: 2446 - protein, 123 aa, Synthetic construct
QVQLVQSGSELKKPGASVKVSCKASGYTFTDYAMNWVRQVPGQGLEWMGWINTYTGNPTYVQGFTGRFVFSLDTSVSTAYLQISSLKAEDTAVYYCARETYYYDSSGFPFDPWGQGTLVTVSS

SEQ ID NO: 2447 - protein, 123 aa, Synthetic construct
QVQLVQSGSELKKPGASVKVSCKASGYTFTNYAMNWVRQAPGQGLEWMGWINTNTGNPTYAQGFTGRFVFPLDTSVSTTYLQISSLKAEDTAVYYCARETYYYQSSGYLFDPWGQGTLVTVSS

SEQ ID NO: 2448 - protein, 123 aa, Synthetic construct
QVQLVQSGSELKKPGASVKVSCKASGYTFTTYSMNWVRQAPGQGLEWMGWINTNTGNPTYAQGFTGRFVFSLDTSVSTAYLQISSLNTEDTAVYYCARETYYYDVGGYPFDPWGQGTLVTVSS

SEQ ID NO: 2449 - protein, 123 aa, Synthetic construct
QVQLVQSGSELEKPGASVKVSCKASGYTFISYAMNWVRQAPGQGLEWMGWINTYTGNPTYAQGFTGRFVFSLDTSVSTAYLQISSLKAEDTAVYYCARETYYYDSGGYPFDPWGQGTLVTVSS

SEQ ID NO: 2450 - protein, 123 aa, Synthetic construct
QVQVVQSGSEVKKPGASVKVSCKASGYTFTTYSMNWVRQAPGQGLEWMGWINTYTGDPTYVQGFTGRFVFSLDTSVSTAYLQISSLKAEDTAVYYCARETYFYDRGGYPFDPWGQGTLVTVSS

SEQ ID NO: 2451 - protein, 123 aa, Synthetic construct
QVQLVQSGSELKKPGASVKVSCKASGYTFTDYAMNWVRQAPGQGLEWMGWINTYTGNPTYVQGFTGRFVFSLDTSVSTAYLQISSLKAEDTAVYYCARETYYYDSSAYPFDPWGQGTLVTVSS

SEQ ID NO: 2452 - protein, 123 aa, Synthetic construct
QVQLVQSGSELEKPGASVKVSCKASGYTFTTYSMNWVRQAPGQGLEWMGWINTYTGSPTYAQGFTGRFVFSLDTSVSTAYLQISSLKAEDTAIYYCARETFYFDSGGYPFDPWGQGTLVTVSS

SEQ ID NO: 2453 - protein, 123 aa, Synthetic construct
QVQLVQSGSELKKPGASVKVSCKASGYTFTTYSMNWVRQAPGQGLEWMGWINTYTGDPTYAQGFTGRFVFSLDTSVSTAYLQISSLKAEDTAVYYCARETYFYDRGGYPFDPWGQGTLVTVSS

SEQ ID NO: 2454 - protein, 123 aa, Synthetic construct
QVQLVQSGSELKKPGASVKVSCKASGYTFTTYAINWVRQAPGQGLEWMGWINTNTGNPTYAQGFTGRFVFSLDTSVSTAHLQISSLKAEDTAVYYCARETYYYATSGYPFDPWGQGALVTVSS

SEQ ID NO: 2455 - protein, 123 aa, Synthetic construct
QVQLVQSGSELKKPGASVKVSCKASGYTFTTYAMNWVRQAPGQGLEWMGWINTYTGDPTYAQGFTGRFVFSLDTSVNTAYLQISSLKAEDTAVYYCARETSYYDRTGYPFDPWGQGTLVTVSS

SEQ ID NO: 2456 - protein, 123 aa, Synthetic construct
QVQLVQSGSELKKPGASVKVSCKASGYTFTTYAMNWVRQAPGQGLEWMGWINTNTGNPTYAQGFTGRFVFSLDTSDSTAFLQISSLKAEDTAVYYCARETYYYDSSGYPFDPWGQGTLVTVSS

SEQ ID NO: 2457 - protein, 123 aa, Synthetic construct
QVELVQSGSELKKPGASVKVSCKASGYTFTTYSMNWVRQAPGQGLEWMGWINTNTGTPTYAQGFTGRFVFSLDTSVSTAYLQISSLKAEDTAVYYCARETYYYDSSGYPFDPWGQGTLVTVSS

SEQ ID NO: 2458 - protein, 123 aa, Synthetic construct
QVQLVQSGSELKKPGASVKVSCKASGYTFTTYSMNWVRQAPGQGLEWMGWINTNTGTPTYAQGFTGRFVFSLDTSVSTAYLQISSLKAEDTAVYYCARETYYYGSSGYPFAPWGQGTLVTVSS

SEQ ID NO: 2459 - protein, 123 aa, Synthetic construct
QVQLVQSGSELKKPGASVKVSCKASGYTFTTYSMNWVRQAPGQGLEWMGWINTYTGNPTYAQGFTGRFVFSLDTSVSTAYLQISSLTTEDTAVYYCARETYYYESSGYPFDPWGQGTLVTVSS

SEQ ID NO: 2460 - protein, 123 aa, Synthetic construct
QVQLVQSGSELEKPGASVKVSCKASGYTFTTYSMNWVRQAPGQGLEWMGWINTYTGSPTYAQGFTGRFVFSLDTSVSTAYLQISSLKAEDTAVYYCARETYYFDSGDYPFDPWGQGTLVTVSS

SEQ ID NO: 2461 - protein, 123 aa, Synthetic construct
QVQLVQSGSELEKPGASVKVSCKASGYTFTTYSMNWVRQAPGQGLEWMGWINTYTGSPTYAQGFTGRFVFSLDTSVSTAYLQISSLKAEDTAVYYCARETYYFDSGGYPFDPWGQGTLVTVSS

SEQ ID NO: 2462 - protein, 123 aa, Synthetic construct
QVQLVQSGSELKKPGASVKVSCKASGYTFTDYAMNWVRQAPGQGLEWMGWINTYTGNPTYVQGFTGRFVFSLDTSVSTAYLQISSLKAEDTAVYYCARETYYYDSSGYPFDPWGQGTLVTVSS

SEQ ID NO: 2463 - protein, 120 aa, Synthetic construct
QVQLVQSGSELKKPGASVKISCKASGYDFTNYAMNWVRQAPGHGLEWMGWINANTGDPTYAQGFTGRFVFSLDTSVSTAYLQISSLKAEDSAVYYCTRERFLEWLHFDYWGQGTLVTVSS

SEQ ID NO: 2464 - protein, 124 aa, Synthetic construct
QVKLEESGGGLVQAGGSLRLSCAASGGTSSTYAMGWFRQAPGKEREFVAAINRSGGSTYYADSVKGRFTISRDNAKNTVYLQMNSLNPEDTAVYYCAAVFLSRNYEIQEYYRYQGQGTQVTVSS

SEQ ID NO: 2465 - protein, 119 aa, Synthetic construct
EVQLQQSGADLVKPGASVKLSCTVSGFNIKDSYIHWLKQRPGQGLEWIGRIDPTNVNTKYDPKFQGKASITTDTSSNTAYLQLSSLTSENTAVYYCARRLRQTYAMDYWGQGTSVTVSS

SEQ ID NO: 2466 - protein, 121 aa, Synthetic construct
DVQLQESGPGLVKPSQSLSLTCTVTGYSITSDYAWNWIRQFPGNKLEWMGYISYSGSTSYNPSLKSRISITRDTSKNQFFLQLSSVTTEDTATYYCARYGGNYPTYAMDYWGQGTSVTVSS

SEQ ID NO: 2467 - protein, 121 aa, Synthetic construct
EVQLVESGGGLVQPKGSLKLSCAASGFTFNTYAMHWVRQAPGKGLEWVARIRIKSKNYATYYADSVKDRFTISRDDSQSMLYLQMNNLKTEDTAMYYCVRAYYTNYWFAYWGQGTLVTVSA

SEQ ID NO: 2468 - protein, 144 aa, Synthetic construct
NASIQQPASSGSDGQRYAMNDDRKRKRMESNRESARRSRMRKQQHLEELMSQMTQLQNQNVLWREKIDAVGRNYLTLDAENNVLRAQMAELTERLDSLNSLARFWADANGLAVDIPEIPDTLLEPWQLPCPIQPITASANMFQF

SEQ ID NO: 2469 - protein, 120 aa, Synthetic construct
EVQLLESGGGLVQPGGSLRLSCAASGFTFSSYAMNWVRQAPGKGLEWVSIISGSGGFTYYADSVKGRFTISRDNSKNTLYLQMNRLRAEDTAIYFCAKDDIPAAGTFDPWGQGTLVTVSS

SEQ ID NO: 2470 - protein, 120 aa, Synthetic construct
EVQLLESGGGLVQPGGSLRLSCAASGFTFSSYAMNWVRQAPGKGLEWVSIISGSGGFTYYADSVKGRFTISRDNSKKTLYLQMSRLRAEDTAIYFCAKDDIPAAGTFDPWGQGTLVTVSS

SEQ ID NO: 2471 - protein, 118 aa, Synthetic construct
EVQLVETGGGLVQPQGSLKLSCAASGFNFNTYAMNWVRQAPGKGLEWVARIRTKSNSYATYYADSVKDRFIISRDDSQSMLYLQMNNLKTEDTAIFYCVVTYWGFIYWGQGTLVTVSA

SEQ ID NO: 2472 - protein, 120 aa, Synthetic construct
EVQLVESGGGVVQPGGSLRLSCAASGRTFSTYAMGWFRQAPGKEREFVAAISWSGSRTYYADSVKGRFTISRDNSKNTVYLQMNSLRPEDTALYYCAADATPANGELDYWGQGTLVTVSS

SEQ ID NO: 2473 - protein, 120 aa, Synthetic construct
EVQLVESGGGVVQPGGSLRLSCAASGRTFSTYAMGWFRQAPGKEREFVAAISRRGGRTYYADSVKGRFTISRDNSKNTVYLQMNSLRPEDTALYYCAADATARDGLLDYWGQGTLVTVSS

SEQ ID NO: 2474 - protein, 120 aa, Synthetic construct
EVQLLESGGGLVQPGGSLRLSCTTSGFTFNTYAMSWVRQAPGKGLEWLSGINNNGRTAFYADSVKGRFTISRDNSKNTLYLQINSLRADDTAVYFCAKDVRFIAVPGDSWGQGTLVTVSS

SEQ ID NO: 2475 - protein, 121 aa, Synthetic construct
QLVESGGGLVQPGGSLRLACAASGFTFSNYAMNWVRQAPGKGLEWVSVISGSGDTTYCADSVKGRFTISRDNSKNTLHLQLNSLRAEDTAVYYCAKNCYGSGSYYNHFDYWGQGTLVTVSS

SEQ ID NO: 2476 - protein, 120 aa, Synthetic construct
EVQLQESGGGLVQPKGSLKLSCAASGFNFNTYTMNWVRQAPGKGLEWVARIRYKSNNYATYYADSVKDRFTISRDDSESILYLQMNNLRTDDTAIYFCVRELGLWYFDVWGAGTTVTVSS

SEQ ID NO: 2477 - protein, 118 aa, Synthetic construct
QVQLKESGPGLVAPSQSLSITCTVSGFSLTNYGVSWVRQPPGKGLEWLGIIWGDGSTNYHSALISRLSISKDNSKSQVFLKLNSLQADDTATYYCAKPNWDTYAMDFWGQGTSVTVSS

SEQ ID NO: 2478 - protein, 127 aa, Synthetic construct
EVQLVESGGGLVQPKGSLKLSCAASGFTFNTYAMHWVRQAPGKGLEWVARIRSKSSNYATYYADSVKDRFTISRDDSQSMLYLQMNNLKTEDTAMYYCVRDGIYYYGTMYYYAMDYWGQGTSVTVSS

SEQ ID NO: 2479 - protein, 127 aa, Synthetic construct
EVQLVESGGGLVQPKGSLKLSCAASGFTFNTYAMHWVRQAPGKGLEWVARIRSKSSNYATYYADSVKDRFTISRDDSQSMLYLQMNNLKTEDTAMYYCVRDGIYYYDTMYYYAMDYWGQGTSVTVSS

SEQ ID NO: 2480 - protein, 127 aa, Synthetic construct
EVQLVESGGGLVQPGGSLRLSCAASGFTFNTYAMHWVRQAPGKGLEWVARIRSKSSNYATYYADSVKDRFTISRDDAKNSLYLQMNSLRAEDTAVYYCARDGIYYYDTMYYYAMDYWGQGTLVTVSS

SEQ ID NO: 2481 - protein, 119 aa, Synthetic construct
EVQLVESGGGLVQPKGSLKLSCAASGFTFNTYAMNWVRQAPGKGLEWIARIRSKSNNYATYYADSMKDRFTISRDDSQSMLYLQMNNLKTEDTAMYYCVRPAQGAMDYWGHGTSVTVSS

SEQ ID NO: 2482 - protein, 118 aa, Synthetic construct
AVHLVESGGGFVQPTESLKISCAASGFTFSDAAMYWVRQAPGKGLEWVARIRTKPNNYATYYADSVKGRFTISRDDSKSMVYLQMDNLKTEDTAMYYCTSWSYDFDYWGQGVMVTVSS

SEQ ID NO: 2483 - protein, 134 aa, Synthetic construct
MLVLQWVLVTALFQGVHCAVQLVESGGGLVQPKESLKISCAAFGVTFSNVAMYWVRQAPGKGLEWIARIRTKPNNYATYYADSVKGRFTISRDDSKSMVYLQMDNLKTEDTAMYYCTAEVATDWGQGVMVTVSS

SEQ ID NO: 2484 - protein, 134 aa, Synthetic construct
MLVLQWVLVTALFQGVHCAVQLVESGGGCVQPKESLKISCAAFGVTFSNVAMYWVRQAPGKGLEWIARIRTKPNNYATYYADSVKGRFTISRDDSKSMVYLQMDNLKTEDTAMYYCTAEVATDWGQGVMVTVSS

SEQ ID NO: 2485 - protein, 134 aa, Synthetic construct
MLVLQWVLVTALFQGVHCAVQLVESGGGLVQPKESLKISCAAFGVTFSNVAMYWVRQAPGKGLEWIARIRTKPNNYATYYADSVKGRFTISRDDSKSMVYLQMDNLKTEDTAMYYCTAEVATDWGQGVCVTVSS

SEQ ID NO: 2486 - protein, 123 aa, Synthetic construct
AVQLVESGGGLVQPGGSLKITCAASGFTFTNAAMYWVRQAPGKGLEWVARIRTKANNYATYYADSVKGRFTISRDDSKSTVYLQMDSVKTEDTATYYCIVVVLTTTRDYFDYWGQGVLVTVSS

SEQ ID NO: 2487 - protein, 121 aa, Synthetic construct
EVQLVESGGGLVQPQGSLKLSCAASGFTFNTYDMHWVRQAPGRGLEWVGRIRSKSSNYATYYADSVKDRFTFSRDDSQGMLYLQLNNLKTEDTAMYYCVRGIYSNYVFSYWGQGTLVTVSA

SEQ ID NO: 2488 - protein, 117 aa, Synthetic construct
EVQLVESGGGLVQPGGSLRLSCAASGFTFNKNAMNWVRQAPGKGLEWVGRIRNKTNNYATYYADSVKARFTISRDDSKNSLYLQMNSLKTEDTAVYYCVAGNSFAYWGQGTLVTVSA

SEQ ID NO: 2489 - protein, 125 aa, Synthetic construct
  VARIANT 101: note = X can be any amino acid
EVKLVESGGGLVQPGGSLRLSCAASGFTFNTYAMNWVRQAPGKGLEWVARIRSKYNNYATYYADSVKDRFTISRDDSKSSLYLQMNNLKTEDTAMYYCVRXGNFGNSYVSWFAYWGQGTLVTVSS

SEQ ID NO: 2490 - protein, 125 aa, Synthetic construct
EVQLVESGGGLVQPGGSLRLSCAASGFTFNTYAMNWVRQAPGKGLEWVARIRSKYNNYATYYAASVKGRFTISRDDSKNSLYLQMNSLKTEDTAVYYCVRHGNFGNSYVSWFAYWGQGTLVTVSS

SEQ ID NO: 2491 - protein, 125 aa, Synthetic construct
EVQLVESGGGLVQPGGSLRLSCAASGFTFSTYAMNWVRQAPGKGLEWVSRIRSKYNNYATYYADSVKDRFTISRDDSKNTLYLQMNSLKTEDTAVYYCVRHGNFGNSYVSWFAYWGQGTLVTVSS

SEQ ID NO: 2492 - protein, 125 aa, Synthetic construct
EVQLVESGGGLVQPGGSLRLSCAASGFTFNTYAMNWVRQAPGKGLEWVARIRSKYNNYATYYADSVKDRFTISRDDSKNILYLQMNSLKTEDTAVYYCVRHGNFGNSYVSWFAYWGQGTLVTVSS

SEQ ID NO: 2493 - protein, 125 aa, Synthetic construct
EVQLVESGGGLVQPGGSLRLSCAASGFTFNTYAMNWVRQAPGKGLEWVARIRSKYNNYATYYADSVKDRFTISRDDSKNSLYLQMNSLKTEDTAVYYCVRHSNFGNSYVSWFAYWGQGTLVTVSS

SEQ ID NO: 2494 - protein, 125 aa, Synthetic construct
EVQLVESGGGLVQPGGSLRLSCAASGFTFNTYAMNWVRQAPGKGLEWVARIRSKYNNYATYYADSVKDRFTISRDDSKNSLYLQMNSLKTEDTAVYYCVRHTNFGNSKVSWFAYWGQGTLVTVSS

SEQ ID NO: 2495 - protein, 125 aa, Synthetic construct
EVQLVESGGGLVQPGGSLRLSCAASGFTFNTYAMNWVRQAPGKGLEWVARIRSKYNNYATYYADSVKDRFTISRDDSKNSLYLQMNSLKTEDTAVYYCVRHSNFGNSKVSWFAYWGQGTLVTVSS

SEQ ID NO: 2496 - protein, 125 aa, Synthetic construct
EVQLVESGGGLVQPGGSLKLSCAASGFTFNKYAMNWVRQAPGKGLEWVARIRSKYNNYATYYADSVKDRFTISRDDSKNTAYLQMNNLKTEDTAVYYCVRHGNFGDSYISYWAYWGQGTLVTVSS

SEQ ID NO: 2497 - protein, 125 aa, Synthetic construct
EVQLVESGGGLVQPGGSLKLSCAASGFTFNKYAMNWVRQAPGKGLEWVARIRSKYNNYATYYADSVKDRFTISRDDSKNTAYLQMNNLKTEDTAVYYCVRHGNFGESYISYWAYWGQGTLVTVSS

SEQ ID NO: 2498 - protein, 125 aa, Synthetic construct
EVQLVESGGGLVQPGGSLKLSCAASGFTFNKYAMNWVRQAPGKGLEWVARIRSKYNNYATYYADSVKDRFTISRDDSKNTAYLQMNNLKTEDTAVYYCVRHGNFGNAYISYWAYWGQGTLVTVSS

SEQ ID NO: 2499 - protein, 123 aa, Synthetic construct
EVQLVESGGGLVQPKGSLKLSCTASGFTFNTYAMNWVRQAPGKGLEWVARIRSKANNYATYYADSVKDRFTISRDDSQRILYLQMNNLKAEDTAMYYCVRDRSRGEDYAMDYWGQGTSVTVSS

SEQ ID NO: 2500 - protein, 124 aa, Synthetic construct
EVQLVETGGGLVQPKGSLKLSCAASGFTFNPNAMNWVRQAPGKGLEWVARIRSKSNNYATYYADSVKDRFTISRDDSQSMLYLQMNNLKTEDTAMYYCVRGKDDGYRHYAMDYWGQGTSVTVSS

SEQ ID NO: 2501 - protein, 120 aa, Synthetic construct
EVQLVETGGGLVQPKGSLKLSCAASGFTFNTNAMNWVRQAPGKGLEWVARIRSKSNNYATYYADSVKDRFTISRDDSQSILYLQMNNLKTEDTAMYYCVRGGPIYHMDCWGQGTSVTVSS

SEQ ID NO: 2502 - protein, 121 aa, Synthetic construct
EVQLVETGGGLVQPKGSLKLSCAASGFTFNTNAMNWVRQAPGKGLEWVARIRSKSNNYATYYADSVKDRFTISRDDSQSMLYLQMNNLKTEDTAMYYCVRDPGLRQGMDYWGQGTSVTVSS

SEQ ID NO: 2503 - protein, 123 aa, Synthetic construct
EVQLVESGGGLVQPKGSLKLSCAASGFTFNTYAMNWVRQAPGKGLEWVARIRSKSNNYATYYADSVKDRFTISRDDSQSMLYLQMNNLKTEDTAMYYCVRGGGNYRGDYFDYWGQGTTLTVSS

SEQ ID NO: 2504 - protein, 120 aa, Synthetic construct
EVQLVESGGGLVQPKGSLKLSCAASGFTFNTYAMNWVRQAPGKGLEWVARIRSKSNNYATYYADSVKDRFTISRDDSQSMLYLQMNNLKTEDTAMYYCVRYDRSYAMDYWGQGTSVTVSS

SEQ ID NO: 2505 - protein, 122 aa, Synthetic construct
EVQLIETGGGLVQPKGSLKLSCAASGFTFNTNAMNWVRQAPGKDLEWVSRIRTKSNNYATYYADSVKDRFTISRDDSQSMLYLQMNNLKTEDTAMYYCVTGTTVVAKEFAYWGQGTLVTVSA

SEQ ID NO: 2506 - protein, 124 aa, Synthetic construct
EVQLVESGGGLVQPGGSLKLSCAASGFTFNPNAMNWVRQASGKGLEWVGRIRSKSNNYATYYADSVKDRFTISRDDSKNTAYLQMNSLKTEDTAVYYCTRGKDDGYRHYAMDYWGQGTTVTVSS

SEQ ID NO: 2507 - protein, 124 aa, Synthetic construct
EVQLVESGGGLVQPGGSLKLSCAASGFTFNPNAMNWVRQASGKGLEWVGRIRSKSNNYATYYADSVKDRFTISRDDSKNTAYLQMNNLKTEDTAVYYCVRGKDDGYRHYAMDYWGQGTTVTVSS

SEQ ID NO: 2508 - protein, 124 aa, Synthetic construct
EVQLVESGGGLVQPGGSLKLSCAASGFTFNPNAMNWVRQASGKGLEWVARIRSKSNNYATYYADSVKDRFTISRDDSKNTLYLQMNNLKTEDTAVYYCVRGKDDGYRHYAMDYWGQGTTVTVSS

SEQ ID NO: 2509 - protein, 123 aa, Synthetic construct
EVQLVESGGGLVQPGGSLKLSCAASGFTFNTYAMNWVRQASGKGLEWVGRIRSKANNYATYYADSVKDRFTISRDDSKNTAYLQMNSLKTEDTAVYYCTSDRSRGEDYAMDYWGQGTLVTVSS

SEQ ID NO: 2510 - protein, 123 aa, Synthetic construct
EVQLVESGGGLVQPGGSLKLSCAASGFTFNTYAMNWVRQASGKGLEWVGRIRSKANNYATYYADSVKDRFTISRDDSKNTAYLQMNNLKTEDTAVYYCVRDRSRGEDYAMDYWGQGTLVTVSS

SEQ ID NO: 2511 - protein, 123 aa, Synthetic construct
EVQLVESGGGLVQPGGSLKLSCAASGFTFNTYAMNWVRQASGKGLEWVARIRSKANNYATYYADSVKDRFTISRDDSKNTLYLQMNNLKTEDTAVYYCVRDRSRGEDYAMDYWGQGTLVTVSS

SEQ ID NO: 2512 - protein, 118 aa, Synthetic construct
EVQLVESGGGLVQPKGSLKLSCAASGFTFNTYAMNWVRQAPGKGLEWVARIRSKSNYYTTYYADSVKDRFTISRDDSQSMLYLQMNNLKTEDTAMYYCIRQRHGNFYWGQGTLVTVSA

SEQ ID NO: 2513 - protein, 125 aa, Synthetic construct
EVQLVESGGGLIQPGGSLRLSCAASGFTFNTYAMNWVRQAPGKCLEWVARIRSKYNNYATYYADSVKDRFTISRDDSKSTLYLQMNNLRAEDTAVYYCVRHGNFGNSYVSWFAYWGQGTLVTVSS

SEQ ID NO: 2514 - protein, 125 aa, Synthetic construct
EVQLVESGGGSVQPGGSLRLSCAASGFTFSTYAMNWVRQAPGKGLEWVGRIRSKANNYATYYADSVKGRFTISRDDSKNTLYLQMNSLRAEDTATYYCVRHGNFGDSYVSWFAYWGQGTTVTVSS

SEQ ID NO: 2515 - protein, 120 aa, Synthetic construct
EVQLLEQSGAELVRPGTSVKISCKASGYAFTNYWLGWVKQRPGHGLEWIGDIFPGSGNIHYNEKFKGKATLTADKSSSTAYMQLSSLTFEDSAVYFCARLRNWDEPMDYWGQGTTVTVSS

SEQ ID NO: 2516 - protein, 122 aa, Synthetic construct
EVQLQQSGAELVRSGASVKLSCTASGFNIKDYYLHWVKQRPEQGLEWIAWIDLENGDIKYAPKFQGKATITADTSSNTAYLQLSSLTSEDTAVYYCNPYYYGSNYDYAMDYWGQGTSVTVSS

SEQ ID NO: 2517 - protein, 115 aa, Synthetic construct
EVQLQQSGPELLKPGASVKISCKTSGYTFTEYTIHWVKQSHGKSLEWIGGIDPNNGGTMYNQKFKGKATLTVDKSSSTAYTDLRSLTSEDSAVYYCTRAEAMDYWGQGTSVTVSS

SEQ ID NO: 2518 - protein, 117 aa, Synthetic construct
EVQLVESGGGLVQPKGSLKLSCAASGFSFNAYAMNWVRQAPGKGLEWVARIRTKNNNYATYYADSVKDRYTISRDDSESMLFLQMNNLKTEDTAMYYCVTFYGNGVWGTGTTVTVSS

SEQ ID NO: 2519 - protein, 117 aa, Synthetic construct
EVQLVESGGGLVKPGGSLRLSCAASGFSFNAYAMNWVRQAPGKGLEWVGRIRTKNNNYATYYADSVKDRFTISRDDSKNTLYLQMNSLKTEDTAVYYCTTFYGNGVWGQGTLVTVSS

SEQ ID NO: 2520 - protein, 117 aa, Synthetic construct
EVQLVESGGGLVKPGGSLRLSCAASGFSFNAYAMNWVRQAPGKGLEWVARIRTKNNNYATYYADSVKDRYTISRDDSKNTLYLQMNSLKTEDTAVYYCTTFYGNGVWGQGTLVTVSS

SEQ ID NO: 2521 - protein, 117 aa, Synthetic construct
EVQLVESGGGLVKPGGSLRLSCAASGFSFNAYAMNWVRQAPGKGLEWVARIRTKNNNYATYYADSVKDRYTISRDDSKNTLYLQMNSLKTEDTAVYYCVTFYGNGVWGQGTLVTVSS

SEQ ID NO: 2522 - protein, 122 aa, Synthetic construct
EVQLVETGGGLVQPKGSLKLSCAASGFTFNTNAMNWVRQAPGKGLEWVARIRSKSNNYATYYADSVEDRFTISRDDSQSMLYLQMNNLKTEDTAMYYCVRNYYDYDAWSAYWGQGTVVTVSS

SEQ ID NO: 2523 - protein, 101 aa, Synthetic construct
EVQLVESGGGLVQPKGSLKLSCAASGFSFNAYAMNWVRQAPGKGLEWVARIRTKNNNYATYYADSVKDRYTISRDDSESMLFLQMNNLKTEDTAMYYCVTF

SEQ ID NO: 2524 - protein, 100 aa, Synthetic construct
EVQLVEVWWRMVQPKGSLKLSCAASGFTFNTYAMNWVRQAPGKGLEWVARIRSKSSNYATYYADSVKDRFTISRDDSQSMLYLQMNNLKTEDTAMYYCVI

SEQ ID NO: 2525 - protein, 123 aa, Synthetic construct
EVQLEESGGGLVQPKGSLKLSCAASGFTFNTYAANWVRQAPGKGLEWIVRIRSKSNNYATYYVDSVKDRFTISRDDSQSALYLQANNLKTEDTAAYYCVTSYYDYDKVLFAYWGQGTTVTVSS

SEQ ID NO: 2526 - protein, 125 aa, Synthetic construct
EVQLLEESGGGLVQPTGSLKLSCAASGFTFNSYAMYWVRQAPGKGLEWVARIRSKSDNYATYYANSVKDRLTISRDDSQNMLYLQMNNLKTEDTAMYYCVRDHDKFPFYYALDYWGPGTLVTVSS

SEQ ID NO: 2527 - protein, 122 aa, Synthetic construct
EVQLVESGGGLVQPGGSLRLSCAASGFTFNTYAMNWVRQAPGKGLEWVGRIRSKSNNYATYYADSVKDRFTISRDDSKNSLYLQMNSLKTEDTAVYYCARQWDYDVRAMNYWGQGTLVTVSS

SEQ ID NO: 2528 - protein, 122 aa, Synthetic construct
EVQLVESGGGLVQPGGSLRLSCAASGFTFNTYAMNWVRQAPGKGLEWVARIRSKSNNYATYYADSVKDRFTISRDNAKNSLYLQMNSLRAEDTAVYYCARQWDYDVRAMNYWGQGTLVTVSS

SEQ ID NO: 2529 - protein, 119 aa, Synthetic construct
EVQLVESGGGLVQPKGSLKLSCAASGFNFNTYAMNWVRQSPGKGLEWVARIRTKSNNYATYYADSVKDRFSVSRDDSQSMLYLQMNNLKTEDTAMYYCVRHEGDWFAYWGQGTLVTVSE

SEQ ID NO: 2530 - protein, 119 aa, Synthetic construct
EVQLVESGGGLVQPKGSLKLSCAASGFNFNTYAMNWVRQAPGKGLEWVARIRSKSNNYATYYADSVKDRFTISRDDSQSMLYLQMNNLKTEDTAMYYCVRHEGDWFAYWGQGTLVTVSA

SEQ ID NO: 2531 - protein, 120 aa, Synthetic construct
LEVKLVESGGGLVQPKGSLKLSCAASGFNFNTYAMNWVRQAPGKGLEWVARIRSKSNNYATYYADSVKDRFTISRDDSQSMLYLQMNNLKTEDTAMYYCVRHEGDWFAYWGQGTLVTVSA

SEQ ID NO: 2532 - protein, 119 aa, Synthetic construct
EVQLVESGGGLVQPKGSLKLSCAASGFNFNTYAMNWVRQAPGKGLEWVARIRSKSNNYATYYADSVKDRFTISRDDSQSMLYLQMNNLKTEDTAMYYCVRHEGNWFAYWGQGTLVTVSA

SEQ ID NO: 2533 - protein, 119 aa, Synthetic construct
EVQLVESGGGLVQPKGSLKLSCAASGFTFNTYAMNWVRQAPGKGLEWVARIRTKSNNYATYYADSVKDRFTISRDDSQSMLYLQMNNLKTEDTATYYCVRQGENRFAYWGQGTLVTVSA

SEQ ID NO: 2534 - protein, 115 aa, Synthetic construct
QVQLQQSGGGLVQPKGSLKLSCAASGFTFNTYAMNWVRQAPGKGLEWVARIRSKSNNYATYYADSVKDRFTISRDDSQSMLYLQMNNLKTEDTAMYYCVRRVAYWGQGTTVTVSS

SEQ ID NO: 2535 - protein, 125 aa, Synthetic construct
EVQLVESGGGLVQPKGSLKLSCAASGFSFNTYAMNWVRQAPGKGLEWVARIRSKSNNYATYYADSVKDRFTISRDDSESMLYLQMNNLKTEDTAMCYCVRHRSNDFYFGSAMDYWGQGTSVTVSS

SEQ ID NO: 2536 - protein, 119 aa, Synthetic construct
EVQLVESGGGLVQPGGSLRLSCAASGFTFNTYAMYWIRQAPGKGLEWVARIRSKSNNYAIYYADSVKDRFTIFRDDSKNSLYLQMNSLKTEDTAVYYCVRPYSDSFAYWGQGTLVTVSS

SEQ ID NO: 2537 - protein, 119 aa, Synthetic construct
EVQLVESGGGLVQPGGSLRLSCAASGFTFNTYAMYWIRQAPGKGLEWVARIRSKSNNYAIYYADSVKDRFTISRDDSKNSLYLQMNSLKTEDTAVYYCVRPYSDSFAYWGQGTLVTVSS

SEQ ID NO: 2538 - protein, 122 aa, Synthetic construct
EVQLVETGGGLVQPKGSLKLSCAASGFTFNTNAMNWVRQAPGKGLEWVARIRSKSNNYAAYYADSVKDRFTISRDDSQSMLYLQMNNLKTEDTAMYYCVREGYGYSLYFDYWGQGTTLTVSS

SEQ ID NO: 2539 - protein, 122 aa, Synthetic construct
EVQLEVQLVESGGGLVQPGGSLRLSCAASGFTFSSYAMSWVRQAPGKGLEWVASISSGNIIYYPDNVKGRFTISRDNSKNTLYLQMNSLRAEDTAVYYCTRGRSTYGGFDHWGQGTTVTVSS

SEQ ID NO: 2540 - protein, 116 aa, Synthetic construct
EVQLVESGGGLVQPKGSLKISCAASGFTFNIYAMNWVRQAPGKGLEWVARIRSQSNNYTTYYADSVKDRFTISRDDSQSMLYLQMNNLKTEDTAMYYCVRQMGDYWGQGTTLTVSS

SEQ ID NO: 2541 - protein, 116 aa, Synthetic construct
EVQLVESGGGLVQPGGSLRLSCAASGFTFNIYAMNWVRQAPGKGLEWVARIRSQSNNYTTYYADSVKDRFTISRDDSKNSLYLQMNSLKTEDTAVYYCVRQMGDYWGQGTLVTVSS

SEQ ID NO: 2542 - protein, 125 aa, Synthetic construct
EVQLEVQLQESGPELVKPGASVKISCKASGYAFSSSWMNWVIQRPGQGLEWIGRIYPGDGDTNYNGKFKGKATLTADKSSSTAYMQLSSLTSVDSAVYFCARSGFITTVLDFDYWGQGTTLTVSS

SEQ ID NO: 2543 - protein, 123 aa, Synthetic construct
EVMLVESGGGLVQPKGSLKLSCAASGFTFNNYAMNWVRQAPGKGLEWVARIRSKSNNYATFYADSVKDRFTISRDDSQSMLYLQMNNLKTEDTAMYYCVRRGARGIHYAMDYWGQGTSLTVSS

SEQ ID NO: 2544 - protein, 123 aa, Synthetic construct
EVMLVESGGGLVQPKGSLKLSCAASGFTFNKYAMNWVRQAPGKGLEWVARIRSKKNNYATFYADSVKDRFTISRDDSQSMLYLQMNNLKTEDTAMYYCVRRGASGIDYAMDYWGQGTSLTVSS

SEQ ID NO: 2545 - protein, 123 aa, Synthetic construct
EVMLVESGGGLVQPKGSLKLSCAASGFTFNNYAMNWVRQAPGKGLEWVARIRSKKNNYATFYADSVKDRFTISRDDSQSMLYLQMNNLKTEDTAMYYCVRRGARGIDYAMDYWGQGTSLTVSS

SEQ ID NO: 2546 - protein, 123 aa, Synthetic construct
EVMLVESGGGLVQPKGSLKLSCAASGFTFNKYAMNWVRQAPGKGLEWVARIRSKKNNYATFYADSVKDRFTISRDDSQSMLYLQMNNLKTEDTAMYYCVRRGASGIHYAMDYWGQGTSLTVSS

SEQ ID NO: 2547 - protein, 123 aa, Synthetic construct
EVMLVESGGGLVQPKGSLKLSCAASGFTFNNYAMNWVRQAPGKGLEWVARIRSKKNNYATFYADSVKDRFTISRDDSQSMLYLQMNNLKTEDTAMYYCVRRGARGIHYAMDYWGQGTSLTVSS

SEQ ID NO: 2548 - protein, 123 aa, Synthetic construct
EVMLVESGGGLVQPKGSLKLSCAASGFTFNKYAMNWVRQAPGKGLEWVARIRSKKNNYATFYADSVKDRFTISRDDSQSMLYLQMNNLKTEDTAMYYCVRRGARGIDYAMDYWGQGTSLTVSS

SEQ ID NO: 2549 - protein, 123 aa, Synthetic construct
EVMLVESGGGLVQPKGSLKLSCAASGFTFNNYAMNWVRQAPGKGLEWVARIRSKSNNYATFYADSVKDRFTISRDDSQSMLYLQMNNLKTEDTAMYYCVRRGARGIDYAMDYWGQGTSLTVSS

SEQ ID NO: 2550 - protein, 123 aa, Synthetic construct
EVMLVESGGGLVQPKGSLKLSCAASGFTFNNYAMNWVRQAPGKGLEWVARIRSKKNNYATFYADSVKDRFTISRDDSQSMLYLQMNNLKTEDTAMYYCVRRGASGIHYAMDYWGQGTSLTVSS

SEQ ID NO: 2551 - protein, 123 aa, Synthetic construct
EVMLVESGGGLVQPKGSLKLSCAASGFTFNKYAMNWVRQAPGKGLEWVARIRSKSNNYATFYADSVKDRFTISRDDSQSMLYLQMNNLKTEDTAMYYCVRRGARGIHYAMDYWGQGTSLTVSS

SEQ ID NO: 2552 - protein, 123 aa, Synthetic construct
EVMLVESGGGLVQPKGSLKLSCAASGFTFNNYAMNWVRQAPGKGLEWVARIRSKKNNYATFYADSVKDRFTISRDDSQSMLYLQMNNLKTEDTAMYYCVRRGASGIDYAMDYWGQGTSLTVSS

SEQ ID NO: 2553 - protein, 123 aa, Synthetic construct
EVMLVESGGGLVQPKGSLKLSCAASGFTFNNYAMNWVRQAPGKGLEWVARIRSKSNRYATFYADSVKDRFTISRDDSQSMLYLQMNNLKTEDTAMYYCVRRGARGIDYAMDYWGQGTSLTVSS

SEQ ID NO: 2554 - protein, 123 aa, Synthetic construct
EVMLVESGGGLVQPKGSLKLSCAASGFTFNNYAMNWVRQAPGKGLEWVARIRSKSNNYATFYADSVKDRFTISRDDSQSMLYLQMNNLKTEDTAMYYCVRRGAKGIDYAMDYWGQGTSLTVSS

SEQ ID NO: 2555 - protein, 123 aa, Synthetic construct
EVMLVESGGGLVQPKGSLKLSCAASGFTFNNYAMNWVRQAPGKGLEWVARIRSKSNNYATFYADSVKDRFTISRDDSQSMLYLQMNNLKTEDTAMYYCVRRGASSIDYAMDYWGQGTSLTVSS

SEQ ID NO: 2556 - protein, 123 aa, Synthetic construct
EVMLVESGGGLVQPKGSLKLSCAASGFTFNNYAMNWVRQAPGKGLEWVARIRSKRNNYATFYADSVKDRFTISRDDSQSMLYLQMNNLKTEDTAMYYCVRRGASGIHYAMDYWGQGTSLTVSS

SEQ ID NO: 2557 - protein, 123 aa, Synthetic construct
EVMLVESGGGLVQPKGSLKLSCAASGFTFNNYAMNWVRQAPGKGLEWVARIRSKSNNYATFYADSVKDRFTISRDDSQSMLYLQMNNLKTEDTAMYYCVRRGASGINYAMDYWGQGTSLTVSS

SEQ ID NO: 2558 - protein, 123 aa, Synthetic construct
EVMLVESGGGLVQPKGSLKLSCAASGFTFNKYAMNWVRQAPGKGLEWVARIRSKSNNYATFYADSVKDRFTISRDDSQSMLYLQMNNLKTEDTAMYYCVRRGASKIDYAMDYWGQGTSLTVSS

SEQ ID NO: 2559 - protein, 123 aa, Synthetic construct
EVMLVESGGGLVQPKGSLKLSCAASGFTFNNYAMNWVRQAPGKGLEWVARIRSKSNNYATFYADSVKDRFTISRDDSQSMLYLQMNNLKTEDTAMYYCVRRGASGIAYAMDYWGQGTSLTVSS

SEQ ID NO: 2560 - protein, 123 aa, Synthetic construct
EVMLVESGGGLVQPKGSLKLSCAASGFTFNNYAMNWVRQAPGKGLEWVARIRSKSNNYATFYADSVKDRFTISRDDSQSMLYLQMNNLKTEDTAMYYCVRRGASGIRYAMDYWGQGTSLTVSS

SEQ ID NO: 2561 - protein, 123 aa, Synthetic construct
EVMLVESGGGLVQPKGSLKLSCAASGFTFNNYAMNWVRQAPGKGLEWVARIRSKSNNYATFYADSVKDRFTISRDDSQSMLYLQMNNLKTEDTAMYYCVRRGASGIDYAMDKWGQGTSLTVSS

SEQ ID NO: 2562 - protein, 117 aa, Synthetic construct
EVQLVETGGGLVQPKGSLKLSCAASGFTFNTNAMNWVRQAPGKGLEWVARIRSKSNNYATYYADSVKDRFTISRDDSQSMLYLQMNNLKTEDTAMYYCVRDGYYSYWGQGTLVTVSA

SEQ ID NO: 2563 - protein, 113 aa, Synthetic construct
EVQVVESGGGLVQPKGSLKLSCVVSGSTLNNYAMNWVRQAPGKGLEWVARIRSKSNNYATYYADSVKDRFTISRDDSQSMIYLQMNNLKTEDTAMYYCVTAYWGQGTLVTVSA

SEQ ID NO: 2564 - protein, 113 aa, Synthetic construct
EVQPVETGGGLVQPKGSLKLSCAASGFSFNTNAMNWVRQAPGKGLEWVARIRSKSNNYATYYADSVKDRFTISRDDSQNMLYLQMNNLKTEDTAMYYCVRAYWGQGTLVTVSA

SEQ ID NO: 2565 - protein, 121 aa, Synthetic construct
EVQLVESGGGLVQSKGSLKLSCAASGFTFNTYAMNWVRQAPGKGLEWVGRIRSKYNNYVTYYGDSVKDRFTISRDDSQSMLYLQMNNLKTEDTAMYYCVRQGRGSYAMDYWGQGTSVTVSS

SEQ ID NO: 2566 - protein, 119 aa, Synthetic construct
EVQLVESGGGLVQPKGSLKLSCAASGFTFNTYAMHWVCQAPGKGLECVARIRSKSNNYATYYADSVKDRFTISRDDSQSMLYLQMNNLKTEDTAMYYCVRERAGYFDVWGAGTTVTVSS

SEQ ID NO: 2567 - protein, 124 aa, Synthetic construct
EVQLEVQLVESGGGLVQPGGSLRLSCAASGFNIKDTYIHWVRQAPGKGLEWVARIYPTNGYTRYADSVKGRFTISADTSKNTAYLQMNSLRAEDTAVYYCSRWGGDGFYAMDYWGQGTLVTVSS

SEQ ID NO: 2568 - protein, 122 aa, Synthetic construct
EVQLVESGGGLVQPKGSLKLSCAASGFTFNTYAMNWVRQAPGKGLEWVARIRSKSNNYATYYADSVKDRFTISRDDSQSMLYLQMNNLKTEDTAMYYCVRQWDYDVRAMNYWGQGTLVTVSS

SEQ ID NO: 2569 - protein, 122 aa, Synthetic construct
EVQLVESGGGLVQPGGSLRLSCAASGFTFNTYAMNWVRQAPGKGLEWVARIRSKSNNYATYYADSVKDRFTISRDDAKNSLYLQMNSLRAEDTAVYYCVRQWDYDVRAMNYWGQGTLVTVSS

SEQ ID NO: 2570 - protein, 120 aa, Synthetic construct
EVQLVESGGGLVQPKGSLKLSCAASGFSIYTYALFWVRQAPGKGLEWVARIRSRSKNYATYYADSVKDRFTISRDDSKNMLYLQMNSLKTEDTAVYYCVLWSYSRALDYWGQGTLVTVSS

SEQ ID NO: 2571 - protein, 120 aa, Synthetic construct
EVQLVESGGGVVQPGRSLRLSCAASGFTFYTSALYWVRQAPGKGLEWVARIRSRSKNYATYYADSVKDRFTISRDDSKNMLYLQMNSLKTEDTAVYYCVLWSYSRALDYWGQGTLVTVSS

SEQ ID NO: 2572 - protein, 120 aa, Synthetic construct
EVQLVESGGDLVKPGGALRLSCAASGFSIYTYALFWVRQAPGKGLEWVARIRSRSKNYATYYADSVKDRFTISRDDSKNMLYLQMNSLKTEDTAVYYCVLWSYSRALDYWGQGTLVTVSS

SEQ ID NO: 2573 - protein, 120 aa, Synthetic construct
EVQLVESGGGVVQPGRSLRLSCAASGFSIYTYALFWVRQAPGKGLEWVARIRSRSKNYATYYADSVKDRFTISRDDSKNMLYLQMNSLKTEDTAVYYCVLWSYSRALDYWGQGTLVTVSS

SEQ ID NO: 2574 - protein, 120 aa, Synthetic construct
EVQLVESGGGLVKPGGSLRLSCAASGFSIYTYALFWVRQAPGKGLEWVARIRSRSKNYATYYADSVKDRFTISRDDSKNMLYLQMNSLKTEDTAVYYCVLWSYSRALDYWGQGTLVTVSS

SEQ ID NO: 2575 - protein, 120 aa, Synthetic construct
EVQLVESGGGLVQPGGSLRLSCAASGFSIYTYALFWVRQAPGKGLEWVARIRSRSKNYATYYADSVKDRFTISRDDSKNMLYLQMNSLKTEDTAVYYCVLWSYSRALDYWGQGTLVTVSS

SEQ ID NO: 2576 - protein, 120 aa, Synthetic construct
EVQLVESGGGLVQPKGSLKLSCAASGFSIYTYALFWVRQAPGKGLEWVARIRSRSKNYATYYADSVKDRFTVSRVDSRNMVYLQMTHLKTEDSAIYYCVLWSYSRALDYWGQGTLVTVSS

SEQ ID NO: 2577 - protein, 120 aa, Synthetic construct
EVQLVESGGGLVQPKGSLKLSCAASGFSIYTYALFWVRQAPGKGLEWVARIRSRSKNYATYYADSVKDRFTVSRVDSRNMVYLQMTHLKTEDSAIYYCVLWSYSRALDYWGQGTSVTVSS

SEQ ID NO: 2578 - protein, 123 aa, Synthetic construct
EVQLVESGGGLVQPKGSLKISCAASGLTFNTYAMNWVRQAPRKGLEWVARIRSKSNNYATYYADSVKDRFTISRDDSQSMLYLQMNNLKTEDTAMYYCVKQGGNSLYWYFDVWGAGTTVTVSS

SEQ ID NO: 2579 - protein, 125 aa, Synthetic construct
EVQLEVQLVESGGGLVQPGRSLRLSCAASGFTFDDYAMHWVRQAPGKGLEWVSAITWNSGHIDYADSVEGRFTISRDNAKNSLYLQMNSLRAEDTAVYYCAKVSYLSTASSLDYWGQGTLVTVSS

SEQ ID NO: 2580 - protein, 120 aa, Synthetic construct
ECQLVESGGGLVQPKGTLKLSCAASGFSFNTHAMNWVRQAPGKSLEWVARTMSKSNNYATYYADSVKDRFIISRDDSQSMLYLQMNNLKTEDTAMYYCVRDDPKRGMDYWGQGTSVTVSS

SEQ ID NO: 2581 - protein, 141 aa, Synthetic construct
MKQSTIALALLPLLFTPVTKAECQLVESGGGLVQPKGTLKLSCAASGFSFNTHAMNWVRQAPGKSLEWVARTMSKSNNYATYYADSVKDRFIISRDDSQSMLYLQMNNLKTEDTAMYYCVRDDPKRGMDYWGQGTSVTVSS

SEQ ID NO: 2582 - protein, 120 aa, Synthetic construct
EVQLVESGGGLVQPKGTLKLSCAASGFSFNTHAMNWVRQAPGKSLEWVARTMSKSNNYATYYADSVKDRFIIRADDSQSMLYLQMNNLKTEDTAMYYCVRDDPKRGMDYWGQGTSVTVSS

SEQ ID NO: 2583 - protein, 125 aa, Synthetic construct
EVQLVESGGGLVQPGGSLKLSCAASGFTFNKYAMNWVRQAPGKCLEWVARIRSKYNNYATYYADSVKDRFTISRDDSKNTAYLQMNNLKTEDTAVYYCVRHGNFGNSYISYWAYWGQGTLVTVSS

SEQ ID NO: 2584 - protein, 125 aa, Synthetic construct
EVQLVESGGGLVQPGGSLRLSCAASGFTFSTYAMNWVRQAPGKGLEWVGRIRSKYNNYATYYADSVKDRFTISRDDSKNTAYLQMNSLRAEDTAVYYCTRHGNFGNSYVSWFAYWGQGTLVTVSS

SEQ ID NO: 2585 - protein, 121 aa, Synthetic construct
EVQLEVQLVESGGGLVMPGGSLKLSCAASGFAFSSYDMSWVRQTPEKRLEWVAYISGGGFTYYPDTVKGRFTLSRDNAKNTLYLQMSSLKSEDTAMYYCARQGANWELVYWGQGTLVTVSA

SEQ ID NO: 2586 - protein, 122 aa, Synthetic construct
EVQLVESGGGLVQPKGSLKLSCVASGFTFKTYAMHWVRQAPGKGLEWVARIRSKSSNYATYYADSVKDRFTISRDDSQSMLYLQMNNLKTEDTAMYYCVRDGGYYVGYFDVWGTGTTVTVSS

SEQ ID NO: 2587 - protein, 122 aa, Synthetic construct
EVQLVESGGGLVQPKGSLKLSCAASGFTFNTYAMHWVRQAPGKGLEWVARIRSKSSNYATYYADSVKDRFTISRDDSQSMLYLQMNNLKTEDTAMYYCVRDGGYYEAWFAYWGQGTLVTVSA

SEQ ID NO: 2588 - protein, 114 aa, Synthetic construct
EVQLVESGGGLVQPKGSLKLSCAASGFTFDTYAMNWVRQAPGKGLEWVARIRSKSNDYATYYVDSVKDRFTISRDDSQNMLYLHMNNLKTEDTAIYYCMISSTFFDCWGQGTSL

SEQ ID NO: 2589 - protein, 118 aa, Synthetic construct
AVQLVESGGGLVQPEGSLKLSCAASGFTFNAYAMNWVRQAPGKGLEWVARIRSKSNDYATYYADSVKDRFTISRDDSQSMLYLQMNNLKTEDTGMYYCLTFSVDLHYWGQGTTLTVSS

SEQ ID NO: 2590 - protein, 118 aa, Synthetic construct
SRGPLESDGGLVQPEGSLKLSCAASGFTFNTYAMNWVRQAPGKGLEWVARIRSKSNNYVTYYADSVKDRFTVSRDDSQSMLYLQMNNLKTEDTGMYYCVTFSVDLHYWGQGTTLTVSS

SEQ ID NO: 2591 - protein, 118 aa, Synthetic construct
EVQLVESGGGLVQPEGSLKLSCAASGFTFNTYAMNWVRQAPGKGLEWVARIRSKSNNYATYYADSVKDRFTISRDDSQSMLYLQMNNLKTEDTGMYYCLTFSVDLHYWGQGTALTVSS

SEQ ID NO: 2592 - protein, 141 aa, Synthetic construct
MLVLQWVLVTALFQGVHCAVHLVESGGGLVQPKESLKISCAASGFTFSNAAMFWVRQAPGKGLEWVARIRTKANNYATYYADSVKGRFTISRDDSKSMVYLQMDNVKTDDTAMYYCIVVVLTTTRDYFDYWGQGVMVTVSS

SEQ ID NO: 2593 - protein, 123 aa, Synthetic construct
RGDAGESGGGLVQPKGSLKLSCAASGFTFNTYAMHWVCQAPGKGLEWVARIRSKSNNYATYYADSVKDRFTISRDDSQSMLYLQMNNLKTEDTAMYYCVRGGYDYDGLSMDYWGQGTSVTVSS

SEQ ID NO: 2594 - protein, 114 aa, Synthetic construct
EVQLVESGGGLVQPKGSLKLSCAASGFTFNTYAMSWVRQAPGKGLEWISRIRSKSNNYATYYVDSVKDRFTIYRDDSQSMLYLQMNNLKTEDTAIYYCVREGDWGQGTLVTVSA

SEQ ID NO: 2595 - protein, 114 aa, Synthetic construct
EVQLVESGGGLVQPKGSLKLSCAASGFTFSTSAMNWVRQAPGKGLEWISRIRSKTNNYATYYVDSVKDRFTIYRDDSQNMLYLQMNNLKTEDTAMYYCVREGDWGQGTLVTVSA

SEQ ID NO: 2596 - protein, 112 aa, Synthetic construct
GGGLVQPKGSLKLSCAASGFTFNTNAMNWVRQAPGKGLEWVARIRSKSNNYATYYADSVKDRFTISRDDSQSMLYLQMNNLKTEDTAMYYCVRDWDGFLYFDYWAKHHLTLF

SEQ ID NO: 2597 - protein, 119 aa, Synthetic construct
EVQLEESGGGLVQPKGSLKLSCTASGFPFNTYAMNWVRQAPGKGLEWVARIRTKSNNYATYYADSVKDRFTISRDDSQNMLYLQMNNLKTEDTAMYYCVRLYGYYFDYWGQGTTLTVSS

SEQ ID NO: 2598 - protein, 121 aa, Synthetic construct
EVHLVESGGELVQPKGSLKLSCAASGFAFNSFAMNWVRQTPGKGLNWVAHIRSKTNNYATFYADSVKDRFTISRDDSQNMLYLQMNNLKTEDTGIYYCVRRGPRDSWFGYWGQGTLVTVSA

SEQ ID NO: 2599 - protein, 121 aa, Synthetic construct
EVQLVESGGGLVQPKGSLKLSCAASGFAFNSFALNWVRQAPGKSLEWVVHIRSKTNNYATFYADSVKDRFTVSRDDSQNMVYLQMNNLKTEDTGIYYCVRRGPRDSWFGYWGQGTLVTVSA

SEQ ID NO: 2600 - protein, 119 aa, Synthetic construct
EVQLVESGGGLIQPKGSLKLSCVASGFSFNTHAMNWVRQAPGKGLEWVARIRSKSNNYARYYADSVKDRFTISRDDSQSILYLQMNNLKTEDTAMYYCVKQGDGGFAYWGQGTLVTVSA

SEQ ID NO: 2601 - protein, 143 aa, Synthetic construct
MLVLQWVLVTALFQGVHCAVQLVESGGGLVQPKESLKISCAASGFTFSNAAMYWVRQAPGKGLEWVARIRTKPNNYATYYADSVKGRFTISRDDSKSMVYLQMDNLKTEDTAMYYCTAPRRTEGIVSSGVDYWGQGVMVTVSS

SEQ ID NO: 2602 - protein, 125 aa, Synthetic construct
AVQLVESGGGLVQPKESLKISCAASGFTFSNAAMYWVRQAPGKGLEWVARIRTKPNNYATYYADSVKGRFTISRDDSKSMVYLQMDNLKTEDTAMYYCTAPRRTEGIVSSGVDYWGQGVMVTVSS

SEQ ID NO: 2603 - protein, 125 aa, Synthetic construct
EVQLVESGGGLVQPGGSLKLSCAASGFTFSNAAMYWVRQASGKGLEWVARIRTKPNNYATYYADSVKGRFTISRDDSKNTAYLQMNSLKTEDTAVYYCTAPRRTEGIVSSGVDYWGQGTLVTVSS

SEQ ID NO: 2604 - protein, 123 aa, Synthetic construct
EVQLVESGGGLVQPKGSLKLSCAASGFTFNTYAMNWVRQAPGKGLEWVARIRSKSNNYATYYADSVKDRFTISRDDSQSMLYLQMNSLKTEDTAMYYCVRRGGNAIYYAMDYWGQGTSVTVSS

SEQ ID NO: 2605 - protein, 122 aa, Synthetic construct
EVQLVESGGGLVQPKGSLKLSCAASGFTFNTYAMNWVRQAPGKGLEWVARIRSKSNNYATYYADSVKDRFTIFRDDSQSILYLQLNNLKTEDTAMYYCVRRGGNPYYAMDYWGQGTSVTVSS

SEQ ID NO: 2606 - protein, 119 aa, Synthetic construct
EVQLEVQLLESGGGLVQPGGSLRLSCAASGFTFRSFGMSWVRQAPGKGPEWVSSISGSGSDTLYADSVKGRFTISRDNSKNTLYLQMNSLRPEDTAVYYCTIGGSLSRSSQGTLVTVSS

SEQ ID NO: 2607 - protein, 125 aa, Synthetic construct
EVQLLESGGGLVQPGGSLRLSCAASGFTFNTYAMNWVRQAPGKGLEWVARIRSKYNNYATYYAASVKGRFTISRDDSKNSLYLQMNSLKTEDTAVYYCARHGNFGNSYVSWFAYWGQGTLVTVSS

SEQ ID NO: 2608 - protein, 125 aa, Synthetic construct
EVQLVESGGGLVQPGGSLKLSCAASGFTFNTYAMNWVRQASGKGLEWVGRIRSKYNAYATYYAASVKGRFTISRDDSKNTAYLQMNSLKTEDTAVYYCTRHGNFGNSYVSWFAYWGQGTLVTVSS

SEQ ID NO: 2609 - protein, 115 aa, Synthetic construct
EVRLVETGGGLVQPEGSLKLSCAASGFTFNANAMNWVRQVPGKGLEWVARIRSKTRNYAIYYADSVKDRFTISRDDSQSMLYLQMFNLKTEDTAMYYCVRDGWWWGQGTSVTVSS

SEQ ID NO: 2610 - protein, 122 aa, Synthetic construct
EVQLVETGGGLVQPKGSMILSCAASGFTFNANAMNWIRQAPGKGLEWVARIRTKSNNYATYYAGSVKDRFTISRDDAQNMLYLQMNDLKTEDTAMYYCVRDYYGSSAWTTYWGQGTLVTVSA

SEQ ID NO: 2611 - protein, 122 aa, Synthetic construct
EVQLVETGGGLAQPKGSMKLSCAASGFTFNANAMNWIRQAPGKGLEWVARIRTKSNNYATYYAGSVKDRFTISRDDAQNMLYLQMNDLKTEDTAMYYCVRDYYGSSAWITYWGQGTLVTVSA

SEQ ID NO: 2612 - protein, 125 aa, Synthetic construct
EVQLEVQLLEQSGAELVRPGALVKLSCKASGFKIKDYFVNWVKQRPEQGLEWIGWIDPENDNSLYGPNFQDKASITADTSSNTGYLQLSGLTSEDTAVYYCALYYGSRGDAMDYWGQGTTVTVSS

SEQ ID NO: 2613 - protein, 123 aa, Synthetic construct
QLVESGGGLVQPGGSLRLSCAASGFTFSTYAMNWVRQAPGKGLEWVGRIRSKANNYATYYADSVKGRFTISRDDSKNTLYLQMNSLRAEDTAVYYCVRHGNFGDSYVSWFAYWGQGTLVTVSS

SEQ ID NO: 2614 - protein, 125 aa, Synthetic construct
EVQLVESGGGLVQPGGSLKLSCAASGFTFNTYAMNWVRQAPGKGLEWVARIRSKYNNYATYYADSVKDRFTISRDDSKNTAYLQMNSLKTEDTAVYYCVRHGNFGDSYVSWFAYWGQGTLVTVSS

SEQ ID NO: 2615 - protein, 123 aa, Synthetic construct
EVQLVESGGGLVQPGGSLRLSCAASGFTFSTYAMNWVRQAPGKCLEWVARIRSKYNNYATYYADTVKGRFTISRDDAKNTLYLQMSSLRAEDTAVYYCVRHGNFGDSYVSWFAYWGQGTLVTV

SEQ ID NO: 2616 - protein, 129 aa, Synthetic construct
EVQLEVQLVESGGGSVQPGGSLRLSCAASGFTFSTYAMNWVRQAPGKGLEWVGRIRSKANNYATYYADSVKGRFTISRDDSKNTLYLQMNSLRAEDTATYYCVRHGNFGDSYVSWFAYWGQGTTVTVSS

SEQ ID NO: 2617 - protein, 125 aa, Synthetic construct
EVQLVESGGGLVQPGGSLKLSCAASGFTFNTYAMNWVRQASGKGLEWVGRIRSKYNNYATYYADSVKDRFTISRDDSKSTLYLQMNSLKTEDTAVYYCVRHGNFGNSYVSWFAYWGQGTLVTVSS

SEQ ID NO: 2618 - protein, 126 aa, Synthetic construct
EVKLVESGGGLVQPGGSLRLSCAASGFTFNTYAMNWVRQAPGKGLEWVARIRSKYNNYATYYADSVKDRFTISRDDSKSSLYLQMNNLKTEDTAMYYCVRHGNFGNSYVSWFAYVWGQGTLVTVSS

SEQ ID NO: 2619 - protein, 124 aa, Synthetic construct
VQLVESGGGLVQPKGSLKLSCAASGFTFNTYAMNWVRQAPGKGLEWVARIRSKYNNYATYYADSVKDRFTISRDDSQSILYLQMNNLKTEDTAMYYCVRHGNFGNSYVSWFAYWGQGTLVTVSA

SEQ ID NO: 2620 - protein, 125 aa, Synthetic construct
EVQLVESGGGLVQPGGSLRLSCAASGFTFNTYAMNWVRQAPGKGLEWVGRIRSKYNNYATYYAASVKGRFTVSRDDSKSSLYLQMNSLKTEDTAVYYCVRHGNFGNSYVSWFAYWGQGTMVTVSS

SEQ ID NO: 2621 - protein, 125 aa, Synthetic construct
EVQLVESGGGLVQPGGSLRLSCAASGFTFNTYAMNWVRQAPGKGLEWVARIRSKYNNYATYYADSVKDRFTVSRDDSKNTAYLQMNSLKTEDTAVYYCVRHGNFGNSYVSWFAYWGQGTMVTVSS

SEQ ID NO: 2622 - protein, 125 aa, Synthetic construct
EVQLVESGGGLVQPGGSLRLSCAASGFTFNTYAMNWVRQAPGKGLEWVARIRSKYNNYATYYADSVKGRFTVSRDDSKNTAYLQMNSLKTEDTAVYYCVRHGNFGNSYVSWFAYWGQGTMVTVSS

SEQ ID NO: 2623 - protein, 129 aa, Synthetic construct
EVQLEVQLVESGGGLVQPGGSLRLSCAASGFTFNTYAMNWVRQAPGKGLEWVARIRSKYNNYATYYADSVKDRFTVSRDDSKNTAYLQMNSLKTEDTAVYYCVRHGNFGNSYVSWFAYWGQGTMVTVSS

SEQ ID NO: 2624 - protein, 129 aa, Synthetic construct
EVQLEVQLVESGGGLVQPGGSLRLSCAASGFTFNTYAMNWVRQAPGKGLEWVARIRSKYNNYATYYADSVKGRFTVSRDDSKNTAYLQMNSLKTEDTAVYYCVRHGNFGNSYVSWFAYWGQGTMVTVSS

SEQ ID NO: 2625 - protein, 129 aa, Synthetic construct
EVQLEVQLVESGGGLVQPGGSLKLSCAASGFTFNTYAMNWVRQASGKGLEWVGRIRSKYNNYATYYADSVKDRFTISRDDSKSTLYLQMNSLKTEDTAVYYCVRHGNFGNSYVSWFAYWGQGTLVTVSS

SEQ ID NO: 2626 - protein, 125 aa, Synthetic construct
EVQLLESGGGIVQPGGSLKLSCAASGFTFNTYAMNWVRQAPGKGLEWVARIRSKYNNYATYYADSVKDRFTISRDDSKNTVYLQMNNLKTEDTAVYYCVRHENFGNSYVSWFAHWGQGTLVTVSS

SEQ ID NO: 2627 - protein, 125 aa, Synthetic construct
EVQLQESGGGIVQPGGSLKLSCAASGFTFNTYAMNWVRQAPGKGLEWVARIRSKYNNYATYYADSVKDRFTISRDDSKNTVYLQMNNLKTEDTAVYYCVRHENFGNSYVSWFAHWGQGTLVTVSS

SEQ ID NO: 2628 - protein, 125 aa, Synthetic construct
EVQLQESGGGLVQPGGSLKLSCAASGFTFNTYAMNWVRQAPGKGLEWVARIRSKYNNYATYYADSVKDRFTISRDDSKNTAYLQMNNLKTEDTAVYYCVRHGNFGNSYVSWFAYWGQGTLVTVSS

SEQ ID NO: 2629 - protein, 129 aa, Synthetic construct
EVQLEVQLLESGGGIVQPGGSLKLSCAASGFTFNTYAMNWVRQAPGKGLEWVARIRSKYNNYATYYADSVKDRFTISRDDSKNTVYLQMNNLKTEDTAVYYCVRHENFGNSYVSWFAHWGQGTLVTVSS

SEQ ID NO: 2630 - protein, 126 aa, Synthetic construct
EVQLVESGGGLVQPGGSLRLSCAASGFTFNTYAMNWVRKAPGKGLEWVGRIRSKYNNYATYYADSVDKGRFTISRDDSKNSLYLQMNSLKTEDTAVYYCVRHGNFGNSYVSWFAYWGQGTLVTVSS

SEQ ID NO: 2631 - protein, 126 aa, Synthetic construct
EVQLVESGGGLVQPGGSLRLSCAASGFTFNTYAMNWVRQAPGKGLEWVGRIRSKYNNYATYYADSVDKGRFTISRDDSKNSLYLQMNSLKTEDTAVYYCVRHGNFGNSYVSWFAYWGQGTLVTVSS

SEQ ID NO: 2632 - protein, 125 aa, Synthetic construct
EVQLVESGGGLVQPGGSLRLSCAASGFTFSTYAMNWVRQAPGKGLEWVGRIRSKYNNYATYYADSVKGRFTISRDDSKNTLYLQMNSLRAEDTAVYYCVRHGNFGDSYVSWFAYWGQGTLVTVCS

SEQ ID NO: 2633 - protein, 125 aa, Synthetic construct
EVQLVESGGGLVQPGGSLRLSCAASGFTFSTYAMNWVRQAPGKGLEWVGRIRSKYNNYATYYADSVKGRFTISRDDSKNTLYLQMNSLRAEDTAVYYCVRHGNFGDSYVSWFAYWGQGTLVTVSC

SEQ ID NO: 2634 - protein, 125 aa, Synthetic construct
EVQLVESGGGLVQPGGSLRLSCAASGFTFSTYAMNWVRQAPGKCLEWVGRIRSKANNYATYYADSVKGRFTISRDDSKNTLYLQMNSLRAEDTAVYYCVRHGNFGDSYVSWFAYWGQGTLVTVSS

SEQ ID NO: 2635 - protein, 125 aa, Synthetic construct
EVQLVESGGGLVQPGGSLRLSCAASGFTFSTYAMNWVRQAPGKCLEWVGRIRSKYNNYATYYADSVKGRFTISRDDSKNTLYLQMNSLRAEDTAVYYCVRHGNFGDEYVSWFAYWGQGTLVTVSS

SEQ ID NO: 2636 - protein, 125 aa, Synthetic construct
EVQLVESGGGLVQPGGSLRLSCAASGFTFSTYAMNWVRQAPGKCLEWVGRIRSKYNNYATYYADSVKGRFTISRDDSKNTLYLQMNSLRAEDTAVYYCVRHGNFGDSYVSWFDYWGQGTLVTVSS

SEQ ID NO: 2637 - protein, 125 aa, Synthetic construct
EVQLVESGGGLVQPGGSLKLSCAASGFTFNTYAMNWVRQASGKGLEWVGRIRSKYNNYATYYADSVKDRFTISRDDSKNTAYLQMNSLKTEDTAVYYCVRHGNFGNSYVSWFAHWGQGTLVTVSS

SEQ ID NO: 2638 - protein, 125 aa, Synthetic construct
EVQLVESGGGLVQPGGSLKLSCAASGFTFNTYAMNWVRQASGKGLEWVGRIRSKYNNYATYYADSVKDRFTISRDDSKSTAYLQMNSLKTEDTAVYYCVRHGNFGNSYVSWFAYWGQGTLVTVSS

SEQ ID NO: 2639 - protein, 124 aa, Synthetic construct
EVQLVESGGGLVQPKGSLKLSCAASGFTFNTYAMNWVRQAPGKGLEWVARIRSKYNNYATYYADSVKDRFTISRDDSQSILYLQMNNLKTEDTAMYYCVRHGNFGNSYVSWFAYWGQGTLVTVS

SEQ ID NO: 2640 - protein, 123 aa, Synthetic construct
EVQLVESGGGLVQPGGSLRLSCAASGFTFNTYAMNWVRQAPGKGLEWVARIRSKYNNYATYYADSVKGRFSISRDDSKNTAYLQMNSLRAEDTAVYYCVRHGNFGNSYVSWFAYWGQGTLVTV

SEQ ID NO: 2641 - protein, 123 aa, Synthetic construct
EVQLVESGGGLVQPGGSLRLSCAASGFTFSTYAMNWVRQAPGKGLEWVARIRSKYNNYATYYADSVKGRFSISRDDSKNTAYLQMNSLRAEDTAVYYCVRHGNFGNSYVSWFAYWGQGTLVTV

SEQ ID NO: 2642 - protein, 123 aa, Synthetic construct
EVQLVESGGGLVQPGGSLRLSCAASGFTFNTYAMNWVRQAPGKGLEWVARIRSKYNNYATYYADSVKDRFSISRDDSKNTAYLQMNSLRAEDTAVYYCVRHGNFGNSYVSWFAYWGQGTLVTV

SEQ ID NO: 2643 - protein, 123 aa, Synthetic construct
EVQLVESGGGLVQPGGSLRLSCAASGFTFNTYAMNWVRQAPGKGLEWVARIRSKYNNYATYYADSVKGRFTISRDDSKNTAYLQMNSLRAEDTAVYYCVRHGNFGNSYVSWFAYWGQGTLVTV

SEQ ID NO: 2644 - protein, 125 aa, Synthetic construct
EVQLVESGGGLVQPGGSLRLSCAASGFTFNTYAMNWVRQAPGKGLEWVARIRSKYNNYATYYADSVKGRFSISRDDSKNTAYLQMNSLRAEDTAVYYCVRHGNFGNSYVSWFAYWGQGTLVTVSS

SEQ ID NO: 2645 - protein, 109 aa, Synthetic construct
QAVVTQESALTTSPGETVTLTCRSSTGAVAANNYANWIQEKPDHLFTGLIAGTNKRAPGVPARFSGSLIGDKAALTITGAQTEDEAIYFCALWYSNYWVFGGGTKVTVL

SEQ ID NO: 2646 - protein, 109 aa, Synthetic construct
QAVVTQESALTTSPGEAVTLTCRSSTGAVTTSNYANWVQEKPDHLFTGLIGGTNTRAPGVPARFSGSLIGDKAALTITGAQTEDEAIYFCVLWYNNYWVFGGGTKLTVL

SEQ ID NO: 2647 - protein, 109 aa, Synthetic construct
QAVVTQESALTTSPGETVTLTCRSSTGAVTTSNYANWVQEKPDHLFTGLIGGTNNRAPGVPARFSGSLIGDKAALTITGAQTEDEAIYFCALWYSNHWVFGGGTKLTVL

SEQ ID NO: 2648 - protein, 109 aa, Synthetic construct
QAVVTQEPSLTVSPGGTVTLTCRSSTGAVTTSNYANWVQQKPGQAPRGLIGGTNTRAPGTPARFSGSLLGGKAALTLSGAQPEDEAEYYCVLWYNNYWVFGGGTKLTVL

SEQ ID NO: 2649 - protein, 109 aa, Synthetic construct
QAVVTQEPSLTVSPGGTVTLTCRSSTGAVTTSNYANWVQQKPGQAPRGLIGGTNTRAPGTPARFSGSLLGGKAALTLSGAQPEDEAEYYCVLWYNNHWVFGGGTKLTVL

SEQ ID NO: 2650 - protein, 109 aa, Synthetic construct
QAVVTQEPSLTVSPGGTVTLTCRASTGAVTTSNYANWVQQKPGQAPRGLIGGTNTRAPGTPARFSGSLLGGKAALTLSGAQPEDEAEYYCVLWYNNHWVFGGGTKLTVL

SEQ ID NO: 2651 - protein, 109 aa, Synthetic construct
QAVVTQEPSLTVSPGGTVTLTCRTSTGAVTTSNYANWVQQKPGQAPRGLIGGTNTRAPGTPARFSGSLLGGKAALTLSGAQPEDEAEYYCVLWYNNHWVFGGGTKLTVL

SEQ ID NO: 2652 - protein, 109 aa, Synthetic construct
QAVVTQESALTTSPGETVTLTCRSSSGAVTTSNFANWVQEKPDHLFTGLIGGTNNRAPGVPARFSGSLIGDKAALTITGAQTEDEAIYFCALWYSNHWVFGGGTKLTVL

SEQ ID NO: 2653 - protein, 109 aa, Synthetic construct
QTVVTQEPSFSVSPGGTVTLTCRSSSGAVTTSNFANWVQQTPGQAPRGLIGGTNNRAPGVPDRFSGSLLGNKAALTITGAQADDESDYYCALWYSNHWVFGGGTKLTVL

SEQ ID NO: 2654 - protein, 109 aa, Synthetic construct
QTVVTQEPSFSVSPGGTVTLTCRSSSGAVTTSNFANWVQQTPGQAPRGLIGGTNNRAPGVPDRFSGSILGNKAALTITGAQADDESDYYCALWYSNHWVFGGGTKLTVL

SEQ ID NO: 2655 - protein, 109 aa, Synthetic construct
QAVVTQESALTTSPGETVTLTCRSNTGTVTTSNYANWVQEKPDHLFTGLIGHTNNRAPGVPARFSGSLIGDKAALTITGAQTEDEAIYFCALWYNNHWVFGGGTKLTVL

SEQ ID NO: 2656 - protein, 107 aa, Synthetic construct
QAVVTQESALTTSPGDTVTLTCRSSTGAVTTSNYANWVQEKPDHLFTGLIGGTNNRVPGVPARFSGSLIGDKAALTITGAQTEDEAMYFCALWYNNHWVFGGGTKLE

SEQ ID NO: 2657 - protein, 109 aa, Synthetic construct
RAGWTQESALTTSPGETVTLTCRSSTGAITTSNYANWVQEKPDHLFTGLIGGTNNRAPGVPARFSGSLIGDKAALTITGAQTEDEAIYFCALWYSNHWVFGGGTKLTVL

SEQ ID NO: 2658 - protein, 109 aa, Synthetic construct
QAVVTQESALTTSPGETVTLTCRSSTGAVTTSNYANWVQEKPDHLFTGLIGGTNKRAPGVPARFSGSLIGDKAALTITGAQTEDEAIYFCALWYSNLWVFGGGTKLTVL

SEQ ID NO: 2659 - protein, 109 aa, Synthetic construct
QTVVTQEPSLTVSPGGTVTLTCRSSTGAVTTSNYANWVQQKPGQAPRGLIGGTNKRAPGTPARFSGSLLGGKAALTLSGVQPEDEAEYYCALWYSNLWVFGGGTKLTVL

SEQ ID NO: 2660 - protein, 109 aa, Synthetic construct
QAVVTQESALTTSPGETVTLTCRSSIGTVTTNNYANWVQEKPDHLFTGLIGSTNNRAPGVPARFSGSLIGDKAALTITGAQTEDEAIYFCALWYSNHWVFGGGTKLTVL

SEQ ID NO: 2661 - protein, 109 aa, Synthetic construct
QAVVTQEPSLTVSPGGTVTLTCGSSTGAVTTSNYANWVQEKPGQAFRGLIGGTNKRAPGTPARFSGSLLGGKAALTLSGAQPEDEAEYYCALWYSNLWVFGGGTKLTVL

SEQ ID NO: 2662 - protein, 109 aa, Synthetic construct
QTVVTQEPSLTVSPGGTVTLTCGSSTGAVTTSNYANWVQQKPGQAPRGLIGGTNKRAPGTPARFSGSLLGGKAALTLSGVQPEDEAEYYCALWYSNLWVFGGGTKLTVL

SEQ ID NO: 2663 - protein, 109 aa, Synthetic construct
QAVVTQESALTTSPGKTVTLTCRSSTGAVTTTNYANWVQEKPDHLFTGLIGGTNNRVPGVPARFSGSLIGDKAALTITGAQTEDEAIYFCALWYSNHWVFGGGTKLTVL

SEQ ID NO: 2664 - protein, 109 aa, Synthetic construct
QAVVTQESALTTSPGETVTLTCRSSTGAVTTSNFANWVQEKPDHLFTGLIGGTNNRAPGVPARFSGSLIGDKAALTITGAQTEDEAIYFCALWYSNLWVFGGGTKLTVL

SEQ ID NO: 2665 - protein, 109 aa, Synthetic construct
QAVVTQEPSLTVSPGGTVTLTCGSSTGAVTTSNHANWVQQKPGQAFRGLIRGTNGRGSWTPARFSGSLLGGKAALTISGAQPEDEAEYYCALWFSNHWVFGGGTKLTVL

SEQ ID NO: 2666 - protein, 109 aa, Synthetic construct
QAVVTQEPSLTVSPGGTVTLTCGSSTGAVTTSNHANWVQQKPGQAFRGLIRGTNGRGSGVPARFSGSLLGGKAALTISGAQPEDEAEYYCALWFSNHWVFGGGTKLTVL

SEQ ID NO: 2667 - protein, 109 aa, Synthetic construct
QAVVTQEPSLTVSPGGTVTLTCGSSTGAVTTSNYANWVQQKPGQAPRGLIGGTNKRAPGVPARFSGSLLGGKAALTLSGAQPEDEAEYYCALWYSNLWVFGGGTKLTVL

SEQ ID NO: 2668 - protein, 109 aa, Synthetic construct
QAVVTQPPSLTVSPGGTVTLTCGSSTGAVTTSNYANWVQQKPGQAPRGLIGGTNKRAPGVPARFSGSLLGGKAALTLSGAQPEDEAEYYCALWYSNLWVFGGGTKLTVL

SEQ ID NO: 2669 - protein, 109 aa, Synthetic construct
QAVVTQEPSLSVSPGGTVTLTCGSSTGAVTTSNYANWVQQKPGQAPRGLIGGTNKRAPGVPARFSGSLLGGKAALTLSGAQPEDEAEYYCALWYSNLWVFGGGTKLTVL

SEQ ID NO: 2670 - protein, 109 aa, Synthetic construct
QAVVTQEPSLTVSPGATVTLTCGSSTGAVTTSNYANWVQQKPGQAPRGLIGGTNKRAPGVPARFSGSLLGGKAALTLSGAQPEDEAEYYCALWYSNLWVFGGGTKLTVL

SEQ ID NO: 2671 - protein, 109 aa, Synthetic construct
QAVVTQEPSLTVSPGQTVTLTCGSSTGAVTTSNYANWVQQKPGQAPRGLIGGTNKRAPGVPARFSGSLLGGKAALTLSGAQPEDEAEYYCALWYSNLWVFGGGTKLTVL

SEQ ID NO: 2672 - protein, 109 aa, Synthetic construct
QAVVTQEPSLTVSPGGTVTLTCGSSTGAVTSSNYANWVQQKPGQAPRGLIGGTNKRAPGVPARFSGSLLGGKAALTLSGAQPEDEAEYYCALWYSNLWVFGGGTKLTVL

SEQ ID NO: 2673 - protein, 109 aa, Synthetic construct
QAVVTQEPSLTVSPGGTVTLTCGSSTGAVTSGHYANWVQQKPGQAPRGLIGGTNKRAPGVPARFSGSLLGGKAALTLSGAQPEDEAEYYCALWYSNLWVFGGGTKLTVL

SEQ ID NO: 2674 - protein, 109 aa, Synthetic construct
QAVVTQEPSLTVSPGGTVTLTCGSSTGAVTTSNYANWVQQKPGQAPRGLIYDTNKRAPGVPARFSGSLLGGKAALTLSGAQPEDEAEYYCALWYSNLWVFGGGTKLTVL

SEQ ID NO: 2675 - protein, 108 aa, Synthetic construct
QAVVTQEPSLTVSPGGTVTLTCGSSTGAVTTSNYANWVQQKPGQAPRGLIYDTNKRAPGVPARFSGSLLGGKAALTLSGAQPEDEAEYYCALWYSNLWVFGGGTKLTV

SEQ ID NO: 2676 - protein, 109 aa, Synthetic construct
QAVVTQEPSLTVSPGGTVTLTCGSSTGAVTTSNYANWVQQKPGQAPRGLIGGTNNRAPGVPARFSGSLLGGKAALTLSGAQPEDEAEYYCALWYSNLWVFGGGTKLTVL

SEQ ID NO: 2677 - protein, 109 aa, Synthetic construct
QAVVTQEPSLTVSPGGTVTLTCGSSTGAVTTSNYANWVQQKPGQAPRGLIGGTNKRASGVPARFSGSLLGGKAALTLSGAQPEDEAEYYCALWYSNLWVFGGGTKLTVL

SEQ ID NO: 2678 - protein, 109 aa, Synthetic construct
QAVVTQEPSLTVSPGGTVTLTCGSSTGAVTTSNYANWVQQKPGQAPRGLIGGTSNKHSWTPARFSGSLLGGKAALTLSGAQPEDEAEYYCALWYSNLWVFGGGTKLTVL

SEQ ID NO: 2679 - protein, 109 aa, Synthetic construct
QAVVTQEPSLTVSPGGTVTLTCGSSTGAVTTSNYANWVQQKPGQAPRGLIGGTNKRAPGVPDRFSGSLLGGKAALTLSGAQPEDEAEYYCALWYSNLWVFGGGTKLTVL

SEQ ID NO: 2680 - protein, 109 aa, Synthetic construct
QAVVTQEPSLTVSPGGTVTLTCGSSTGAVTTSNYANWVQQKPGQAPRGLIGGTNKRAPGVPARFSGSKSGGKAALTLSGAQPEDEAEYYCALWYSNLWVFGGGTKLTVL

SEQ ID NO: 2681 - protein, 109 aa, Synthetic construct
QAVVTQEPSLTVSPGGTVTLTCGSSTGAVTTSNYANWVQQKPGQAPRGLIGGTNKRAPGVPARFSGSSSGGKAALTLSGAQPEDEAEYYCALWYSNLWVFGGGTKLTVL

SEQ ID NO: 2682 - protein, 109 aa, Synthetic construct
QAVVTQEPSLTVSPGGTVTLTCGSSTGAVTTSNYANWVQQKPGQAPRGLIGGTNKRAPGVPARFSGSLLGGKAALTISGAQPEDEAEYYCALWYSNLWVFGGGTKLTVL

SEQ ID NO: 2683 - protein, 109 aa, Synthetic construct
QAVVTQEPSLTVSPGGTVTLTCGSSTGAVTTSNYANWVQQKPGQAPRGLIGGTNKRAPGVPARFSGSLLGGKAALTLSGAQAEDEAEYYCALWYSNLWVFGGGTKLTVL

SEQ ID NO: 2684 - protein, 109 aa, Synthetic construct
QAVVTQEPSLTVSPGGTVTLTCGSSTGAVTTSNYANWVQQKPGQAPRGLIGGTNKRAPGVPARFSGSLLGGKAALTLSGAQSEDEAEYYCALWYSNLWVFGGGTKLTVL

SEQ ID NO: 2685 - protein, 109 aa, Synthetic construct
QAVVTQEPSLTVSPGGTVTLTCGSSTGAVTTSNYANWVQQKPGQAPRGLIGGTNKRAPGVPARFSGSLLGGKAALTLSGAQPEDEADYYCALWYSNLWVFGGGTKLTVL

SEQ ID NO: 2686 - protein, 109 aa, Synthetic construct
QAVVTQEPSLTVSPGGTVTLTCGSSTGAVTTSNYANWVQQKPGQAPRGLIGGTNKRAPGVPARFSGSLLGGKAALTLSGAQPEDEAEYYCLLWYSNLWVFGGGTKLTVL

SEQ ID NO: 2687 - protein, 109 aa, Synthetic construct
QAVVTQEPSLTVSPGGTVTLTCGSSTGAVTTSNYANWVQQKPGQAPRGLIGGTNKRAPGVPARFSGSLLGGKAALTLSGAQPEDEAEYYCALWYSNHWVFGGGTKLTVL

SEQ ID NO: 2688 - protein, 109 aa, Synthetic construct
QAVVTQEPSLTVSPGGTVTLTCGSSTGAVTTSNYANWVQQKPGQAPRGLIGGTNKRAPGVPARFSGSLLGGKAALTLSGAQPEDEAEYYCALWYSNLWVFGGGTKLEIK

SEQ ID NO: 2689 - protein, 109 aa, Synthetic construct
QAVVTQEPSLTVSPGGTVTLTCGSSTGAVTTSNYANWVQQKPGQAPRGLIGGTNKRAPGVPARFSGSLLGGKAALTDSGAQPEDEADYYCALWYSNHWVFGGGTKLTVL

SEQ ID NO: 2690 - protein, 109 aa, Synthetic construct
QAVVTQEPSLTVSPGGTVTLTCGSSTGAVTTSNYANWVQEKPGQAPRGLIGGTNKRAPGVPARFSGSLLGGKAALTLSGAQPEDEAEYYCALWYSNLWVFGGGTKLTVL

SEQ ID NO: 2691 - protein, 109 aa, Synthetic construct
QAVVTQEPSLTVSPGGTVTLTCGSSTGAVTTSNYANWVQQKPGKAPRGLIGGTNKRAPGVPARFSGSLLGGKAALTLSGAQPEDEAEYYCALWYSNLWVFGGGTKLTVL

SEQ ID NO: 2692 - protein, 107 aa, Synthetic construct
QAVVTQEPSLTVSPGGTVTLTCGSSTGAVTTSNYANWVQQKPGKAPRGLIGGTNKRAPGVPARFSGSLLGGKAALTLSGAQPEDEAEYYCALWYSNLWVFGGGTKLT

SEQ ID NO: 2693 - protein, 109 aa, Synthetic construct
QAVVTQEPSLTVSPGGTVTLTCGSSTGAVTTSNYANWVQQKPGTAPRGLIGGTNKRAPGVPARFSGSLLGGKAALTLSGAQPEDEAEYYCALWYSNLWVFGGGTKLTVL

SEQ ID NO: 2694 - protein, 109 aa, Synthetic construct
QAVVTQEPSLTVSPGGTVTLTCGSSTGAVTTSNYANWVQQKPGSPPRGLIGGTNKRAPGVPARFSGSLLGGKAALTLSGAQPEDEAEYYCALWYSNLWVFGGGTKLTVL

SEQ ID NO: 2695 - protein, 109 aa, Synthetic construct
QAVVTQEPSLTVSPGGTVTLTCGSSTGAVTTSNYANWVQQKPGQPPRGLIGGTNKRAPGVPARFSGSLLGGKAALTLSGAQPEDEAEYYCALWYSNLWVFGGGTKLTVL

SEQ ID NO: 2696 - protein, 109 aa, Synthetic construct
QAVVTQEPSLTVSPGGTVTLTCGSSTGAVTTSNYANWVQQKPGQGPRGLIGGTNKRAPGVPARFSGSLLGGKAALTLSGAQPEDEAEYYCALWYSNLWVFGGGTKLTVL

SEQ ID NO: 2697 - protein, 109 aa, Synthetic construct
QAVVTQEPSLTVSPGGTVTLTCGSSTGAVTTSNYANWVQQKPGQSPRGLIGGTNKRAPGVPARFSGSLLGGKAALTLSGAQPEDEAEYYCALWYSNLWVFGGGTKLTVL

SEQ ID NO: 2698 - protein, 109 aa, Synthetic construct
QAVVTQEPSLTVSPGGTVTLTCGSSTGAVTTSNYANWVQQKPGQDPRGLIGGTNKRAPGVPARFSGSLLGGKAALTLSGAQPEDEAEYYCALWYSNLWVFGGGTKLTVL

SEQ ID NO: 2699 - protein, 109 aa, Synthetic construct
QAVVTQEPSLTVSPGGTVTLTCGSSTGAVTTSNYANWVQQKPGQAPRGLIGGTNKRAPGVPARFSGSLLGGKAALTISGAQPEDEADYYCALWYSNHWVFGGGTKLTVL

SEQ ID NO: 2700 - protein, 109 aa, Synthetic construct
QAVVTQEPSLTVSPGGTVTLTCGSSTGAVTTSNYANWVQQKPGQAPRGLIGGTNKRAPGVPARFSGSLLGGKAALTISGAQPEDEAEYYCALWYSNHWVFGGGTKLTVL

SEQ ID NO: 2701 - protein, 109 aa, Synthetic construct
QAVVTQEPSLTVSPGGTVTLTCGSSTGAVTTSNYANWVQQKPGKAPRGLIGGTNKRAPGVPARFSGSLLGGKAALTISGAQPEDEAEYYCALWYSNHWVFGGGTKLTVL

SEQ ID NO: 2702 - protein, 109 aa, Synthetic construct
QAVVTQEPSLTVSPGGTVTLTCGSSTGAVTTSNYANWVQQKPGQSPRGLIGGTNKRAPGVPARFSGSLLGGKAALTISGAQPEDEAEYYCALWYSNHWVFGGGTKLTVL

SEQ ID NO: 2703 - protein, 109 aa, Synthetic construct
QAVVTQEPSLTVSPGGTVTLTCGSSTGAVTTSNYANWVQQKPGKSPRGLIGGTNKRAPGVPARFSGSLLGGKAALTISGAQPEDEAEYYCALWYSNHWVFGGGTKLTVL

SEQ ID NO: 2704 - protein, 109 aa, Synthetic construct
QAVVTQEPSLTVSPGGTVTLTCGSSTGAVTTSNYANWVQQKPGKAPRGLIGGTNKRAPGVPARFSGSLLGGKAALTISGAQPEDEADYYCALWYSNHWVFGGGTKLTVL

SEQ ID NO: 2705 - protein, 109 aa, Synthetic construct
QAVVTQEPSLTVSPGGTVTLTCGSSTGAVTTSNYANWVQQKPGQSPRGLIGGTNKRAPGVPARFSGSLLGGKAALTISGAQPEDEADYYCALWYSNHWVFGGGTKLTVL

SEQ ID NO: 2706 - protein, 109 aa, Synthetic construct; identical to SEQ ID NO: 157

SEQ ID NO: 2707 - protein, 109 aa, Synthetic construct; identical to SEQ ID NO: 180

SEQ ID NO: 2708 - protein, 109 aa, Synthetic construct
QAVVTQEPSLTVSPGGTVTLTCGSSTGAVTTSNYANWVQQKPGKCPRGLIGGTNKRAPGVPARFSGSLLGGKAALTISGAQPEDEADYYCALWYSNHWVFGGGTKLTVL

SEQ ID NO: 2709 - protein, 109 aa, Synthetic construct
QAVVTQEPSLTVSPGGTVTLTCGSSTGAVTTSNYANWVQQKPGKSPRGLICGTNKRAPGVPARFSGSLLGGKAALTISGAQPEDEADYYCALWYSNHWVFGGGTKLTVL

SEQ ID NO: 2710 - protein, 109 aa, Synthetic construct
QAVVTQEPSLTVSPGGTVTLTCGSSTGAVTTSNYANWVQQKPGKSPRGLIGCTNKRAPGVPARFSGSLLGGKAALTISGAQPEDEADYYCALWYSNHWVFGGGTKLTVL

SEQ ID NO: 2711 - protein, 109 aa, Synthetic construct
QAVVTQEPSLTVSPGGTVTLTCGSSTGAVTTSNYANWVQQKPGKSPRCLIGGTNKRAPGVPARFSGSLLGGKAALTISGAQPEDEADYYCALWYSNHWVFGGGTKLTVL

SEQ ID NO: 2712 - protein, 109 aa, Synthetic construct
QAVVTQEPSLTVSPGGTVTLTCGSSTGAVTTSNYANWVQCKPGKSPRGLIGGTNKRAPGVPARFSGSLLGGKAALTISGAQPEDEADYYCALWYSNHWVFGGGTKLTVL

SEQ ID NO: 2713 - protein, 109 aa, Synthetic construct
QAVVTQEPSLTVSPGGTVTLTCGSSTGAVTTSNYANWVQQKPGCSPRGLIGGTNKRAPGVPARFSGSLLGGKAALTISGAQPEDEADYYCALWYSNHWVFGGGTKLTVL

SEQ ID NO: 2714 - protein, 109 aa, Synthetic construct
QAVVTQEPSLTVSPGGTVTLTCGSSTGAVTTSNYANWVQQKPGKSPRGLIGGTNCRAPGVPARFSGSLLGGKAALTISGAQPEDEADYYCALWYSNHWVFGGGTKLTVL

SEQ ID NO: 2715 - protein, 109 aa, Synthetic construct
QAVVTQEPSLTVSPGGTVTLTCGSSTGAVTTSNYANWVQQKPGKSPRGLIGGTNKRCPGVPARFSGSLLGGKAALTISGAQPEDEADYYCALWYSNHWVFGGGTKLTVL

SEQ ID NO: 2716 - protein, 109 aa, Synthetic construct
QAVVTQESALTTSPGETVTLTCRSSTGAVTTSNYANWIQEKPDHLFTGLIGGTNNRAPGVPARFSGSLIGDKAALTITGAQTEDEAIYFCGLWYSNHLVFGGGTKLTVL

SEQ ID NO: 2717 - protein, 109 aa, Synthetic construct
QAVVTQEPSLTVSPGGTVTLTCRSSTGAVTTSNYANWFQQKPGQAPRTLIGGTNKRAPWTPARFSGSLLGGKAALTITGAQAEDEADYYCALWYSNLWVFGGGTKLTVL

SEQ ID NO: 2718 - protein, 109 aa, Synthetic construct
QAVVTQEPSLTVSPGGTVTLTCRSSTGAVTTSNYANWVQQKPGQAPRTLIGGTNKRAPWTPARFSGSLLGGKAALTITGAQAEDEADYYCALWYSNLWVFGGGTKLTVL

SEQ ID NO: 2719 - protein, 109 aa, Synthetic construct
QAVVTQEPSLTVSPGGTVTLTCRSSTGAVTTSNYANWFQEKPGQAPRTLIGGTNKRAPWTPARFSGSLLGGKAALTITGAQAEDEADYYCALWYSNLWVFGGGTKLTVL

SEQ ID NO: 2720 - protein, 109 aa, Synthetic construct
QAVVTQEPSLTVSPGGTVTLTCRSSTGAVTTSNYANWFQQKPGQAPRGLIGGTNKRAPWTPARFSGSLLGGKAALTITGAQAEDEADYYCALWYSNLWVFGGGTKLTVL

SEQ ID NO: 2721 - protein, 109 aa, Synthetic construct
QAVVTQEPSLTVSPGGTVTLTCRSSTGAVTTSNYANWVQEKPGQAPRTLIGGTNKRAPWTPARFSGSLLGGKAALTITGAQAEDEADYYCALWYSNLWVFGGGTKLTVL

SEQ ID NO: 2722 - protein, 109 aa, Synthetic construct
QAVVTQEPSLTVSPGGTVTLTCRSSTGAVTTSNYANWVQQKPGQAPRGLIGGTNKRAPWTPARFSGSLLGGKAALTITGAQAEDEADYYCALWYSNLWVFGGGTKLTVL

SEQ ID NO: 2723 - protein, 109 aa, Synthetic construct
QAVVTQEPSLTVSPGGTVTLTCRSSTGAVTTSNYANWFQEKPGQAPRGLIGGTNKRAPWTPARFSGSLLGGKAALTITGAQAEDEADYYCALWYSNLWVFGGGTKLTVL

SEQ ID NO: 2724 - protein, 109 aa, Synthetic construct
QAVVTQEPSLTVSPGGTVTLTCRSSTGAVTTSNYANWVQEKPGQAPRGLIGGTNKRAPWTPARFSGSLLGGKAALTITGAQAEDEADYYCALWYSNLWVFGGGTKLTVL

SEQ ID NO: 2725 - protein, 109 aa, Synthetic construct
QAVVTQEPSLTVSPGGTVTLTCRSSTGAVTTSNYANWVQEKPGQAFRGLIGGTNKRAPWTPARFSGSLLGGKAALTITGAQAEDEADYYCALWYSNLWVFGGGTKLTVL

SEQ ID NO: 2726 - protein, 109 aa, Synthetic construct
QAVVTQEPSLTVSPGGTVTLTCRSSTGAVTTSNYANWFQQKPDHLFTGLIGGTNKRAPWTPARFSGSLLGGKAALTITGAQAEDEADYYCALWYSNLWVFGGGTKLTVL

SEQ ID NO: 2727 - protein, 109 aa, Synthetic construct
QAVVIQESALTTPPGETVTLTCGSSTGAVTASNYANWVQEKPDHCFTGLIGGHNNRPPGVPARFSGSLIGDKAALTIAGTQTEDEAIYFCALWYSDHWVIGGGTRLTVL

SEQ ID NO: 2728 - protein, 109 aa, Synthetic construct
EAVVTQEPSLTVSPGGTVTLTCRSSTGAVTTSNYANWVQQKPGQAPRGLIGGTNKRAPWTPARFSGSLLGGKAALTLSGAQPEDEAEYYCALWYSNLWVFGGGTKLTVL

SEQ ID NO: 2729 - protein, 108 aa, Synthetic construct
QAVVTQESALTTSPGGTVILTCRSSTGAVTTSNYANWVQEKPDHLFTGLIGGTSNRAPGVPVRFSGSLIGDKAALTITGAQTEDDAMYFCALWYSTHFVFGGGTKVTV

SEQ ID NO: 2730 - protein, 109 aa, Synthetic construct
EAVVTQEPSLTVSPGGTVTLTCRSSTGAVTTSNYANWFQQKPGQAPRTLIYGTNKRAPWTPARFSGSLLGGKAALTLSGAQPEDEAEYYCALWYSNLWVFGGGTKLTVL

SEQ ID NO: 2731 - protein, 109 aa, Synthetic construct
QAVVTQEPSLTVSPGGTVTLTCGSSTGAVTTSNYASWVQQKPGQAFTGLIGGTNNRAPWTPARFSGSLLGGKAALTLSGAQPEDEAEYYCALWYSNHWVFGGGTKLTVL

SEQ ID NO: 2732 - protein, 109 aa, Synthetic construct
DAVVTQESALTTSPGETVTLTCRSSTGAVTTSNYASWVQEKPDHLFTGLIGGTNNRAPGVPARFSGSLIGDKAALTITGAQTEDEAIYFCALWYSNHWVFGGGTKLTVL

SEQ ID NO: 2733 - protein, 109 aa, Synthetic construct
DAVVTQESALTTSPGETVTLTCRSSTGAVTTSNYASWVQEKPDHLFTGLIGGTNCRAPGVPARFSGSLIGDKAALTITGAQTEDEAIYFCALWYSNHWVFGGGTKLTVL

SEQ ID NO: 2734 - protein, 109 aa, Synthetic construct
DAVVTQESALTTSPGETVTLTCRSSTGAVTTSNYASWVQEKPDHLFTGLICGTNNRAPGVPARFSGSLIGDKAALTITGAQTEDEAIYFCALWYSNHWVFGGGTKLTVL

SEQ ID NO: 2735 - protein, 109 aa, Synthetic construct
QAVVTQESALTTSPGETVTLTCRSSTGAVTTSNYANWVQEKPDHLFTGLIGATNNRAPGVPARFSGSLIGDKAVLTITGAQTEDEAIYFCALWYRNHFIFGSGTKVTVL

SEQ ID NO: 2736 - protein, 113 aa, Synthetic construct
MAELDAVVTQESALTTSPGETVTLTCRSSTGTVTTSNYANWVQEKPDHLFTGLIGGTKNRAPGVPARFSGSLIGDKAALTITGAQTEDEAIYFCALWYSNHWVFGGGTKLTVL

SEQ ID NO: 2737 - protein, 109 aa, Synthetic construct
QAVVTQESALTTSPGETVTLTCRSSTGAVTTSNYANWVQEKPDHLFTGLIGGTNNRAPGVPARFSGSLIGDKAALTITGAQTEDEAIYFCALWYNNHLVFGGGTKLTVL

SEQ ID NO: 2738 - protein, 109 aa, Synthetic construct
DAVVTQESALTSSPGETVTLTCRSSTGAVTTSNYASWVQEKPDHLFTGLIGGTNNRAPGVPARFSGSLIGDKAALTITGAQTEDEAIYFCVLWYSDHWVFGCGTKLTVL

SEQ ID NO: 2739 - protein, 109 aa, Synthetic construct
QAVVTQEPSFSVSPGGTVTLTCRSSTGAVTTSNYANWVQQTPGQAFRGLIGGTNKRAPGVPARFSGSLIGDKAALTITGAQADDESIYFCALWYSNLWVFGGGTKLTVL

SEQ ID NO: 2740 - protein, 109 aa, Synthetic construct
QAVVTQEPSFSVSPGGTVTLTCRSSTGAVTTSNYANWVQQTPGQAFRGLIGGTNKRAPGVPARFSGSILGNKAALTITGAQADDESIYFCALWYSNLWVFGGGTKLTVL

SEQ ID NO: 2741 - protein, 109 aa, Synthetic construct
QAVVTQEPSFSVSPGGTVTLTCRSSTGAVTTSNYANWVQQTPGQAFRGLIGGTNKRAPGVPARFSGSILGNKAALTITGAQADDESDYYCALWYSNLWVFGGGTKLTVL

SEQ ID NO: 2742 - protein, 109 aa, Synthetic construct
QAVVTQEPSLSVSPGGTVTLTCRSSTGAVTTSNYANWVQQKPGQAFRGLIGGTNNRAPGVPARFSGSLIGDKAALTITGAQADDESIYFCALWYSNHWVFGGGTKLTVL

SEQ ID NO: 2743 - protein, 109 aa, Synthetic construct
QAVVTQEPSFSVSPGGTVTLTCRSSTGAVTTSNYANWVQQKPGQAFRGLIGGTNKRAPGVPARFSGSLIGDKAALTITGAQADDESIYFCALWYSNLWVFGGGTKLTVL

SEQ ID NO: 2744 - protein, 110 aa, Synthetic construct
QAVVTQESALTTSPGETVTLTCRSSTGAVTTSNYANWVQEKPDHLFTGLIGGTNNRAPGVPARFSGSLIGDKAALTITGAQTEDEAIYFCALWYSNHFWVFGGGTKLTVL

SEQ ID NO: 2745 - protein, 109 aa, Synthetic construct
QAVVTQESALTTSPGETVTLTCRSSTGTVTTSNFANWVQEKPDHLFTGLIGGTSNRAPGVPARFSGSLIGDKAALTITGAQTEDEAIYFCVLWCSNLWVFGGGTKLTVL

SEQ ID NO: 2746 - protein, 109 aa, Synthetic construct
QAVVIQESALTTSPGGTVILTCRSSTGTITTSNYANWVQKKPNHVFTGLIGATSIRAPGVPVRFSGFLIGGKAALTITGAQTEDDAMYFCALWYNTHYVFGGGTKVTVL

SEQ ID NO: 2747 - protein, 109 aa, Synthetic construct
QTVVTQESALTTSPGETVTLTCRSSTGAVTTSNYANWVQEKPDHLFTGLIVGTNNRVPGVPPRFSGSLIEDKAALTITGAQTEDEAIYFCALWYSNHWVFGGGTKLTVL

SEQ ID NO: 2748 - protein, 109 aa, Synthetic construct
QAVVTQEPSLTVSPGGTVTLTCRSSTGAVTTSNYANWVQQKPGQLFRGLIGGTNNRAPWVPARFSGSLIGDKAALTLSGVQPEDEAEYFCALWYSNHWVFGGGTKLTVL

SEQ ID NO: 2749 - protein, 109 aa, Synthetic construct
QAVVTQESVITTSPGETVTLTCRLSTGAVTSRNYANWVQEKPDHLFTGLIGGTNNRAPGVPARFSGSLIGDKAVLTITGAQTEDEAIYFCALWYSNHWVFGGGTKLTVL

SEQ ID NO: 2750 - protein, 109 aa, Synthetic construct
QAVVTQESALTTSPGETVTLTCRSSSGPVTTSNYANWVQERPDHLFTNLIGGTNNRAPGVPARFSGSLIGDKAALTITGAQTEDEAIYFCALWYSNHLVFGGGTKLTVL

SEQ ID NO: 2751 - protein, 108 aa, Synthetic construct
QAVVTQEPSLTVSPGGTVTLTCRSSTGAITTNNFANWFQQKPGQAFRGLIGDTNNRVPGVPARFSGSLLGNKAALTITGAQPEDEAEYYCALWYNNWVFGGGTKLTVL

SEQ ID NO: 2752 - protein, 108 aa, Synthetic construct
QAVVTQEPSLTVSPGGTVTLTCRSSTGAITTNNFANWFQQKPGQAFRGLIGDTNNRVPGVPARFSGSLIGDKAALTITGAQPEDEAEYYCALWYNNWVFGGGTKLTVL

SEQ ID NO: 2753 - protein, 162 aa, Synthetic construct
DVQLQQSGPGLVAPSQSLSITCTVSGFLLTDYGVNWVRQSPGKCLEWLGVIWGDGITDYNSALKSRLSVTKDNSKSQVFLKMNSLQSGDSARYYCVTGLFDYWGQGTTLTVSSPARFSGSLIGDKAALTITGAQTEDEAIYFCVLWYSDHWVFGCGTKLTVL

SEQ ID NO: 2754 - protein, 109 aa, Synthetic construct
QAVVTQESALSTSPGETVTLTCRSSTGAVTTSNYANWVQEKPDHLFTGLLGDTDNRPPGVPARFSGSLLGDKAALTITGAQTEDEAIYFCALWYSNHWVFGGGTKLTVL

SEQ ID NO: 2755 - protein, 109 aa, Synthetic construct
QAVVTQEPSLTVSPGGTVTLTCRSSTGAVTTSNYANWVQEKPGQAFRGLIGGTNKRAPGTPARFSGSLLGGKAALTLSGAQPEDEAEYYCALWYSNLWVFGGGTKLTVL

SEQ ID NO: 2756 - protein, 109 aa, Synthetic construct
QTVVTQEPSLTVSPGGTVTLTCGSSTGAVTTSNYANWVQEKPGQAFRGLIGGTNKRAPGTPARFSGSLLGGKAALTLSGAQPEDEAEYYCALWYSNLWVFGGGTKLTVL

SEQ ID NO: 2757 - protein, 109 aa, Synthetic construct
QTVVTQEPSLTVSPGGTVTLTCGSSTGAVTTSNYANWVQQKPGQAPRGLIGGTNARAPGTPARFSGSLLGGKAALTLSGVQPEDEAEYYCALWYSNLWVFGGGTKLTVL

SEQ ID NO: 2758 - protein, 109 aa, Synthetic construct
QTVVTQEPSLTVSPGGTVTLTCGSSTGAVTTSNYANWVQQKPGQAPRGLIGGTNKRAPGTPARFSGSLLGGKAALTLSGVQPEDEAEYYCALWYANLWVFGGGTKLTVL

SEQ ID NO: 2759 - protein, 109 aa, Synthetic construct
QAVVTQESALTTSPGETVTLTCRSSTGAVTTSNYVNWVQEKPDHLFTGLIGGTNNRGPGVPARFSGSLIGDKAALTITGTQTEDEAIYFCALWYSNHWVFGGGTKLTVL

SEQ ID NO: 2760 - protein, 109 aa, Synthetic construct
QAVVTQEPSLTVSPGGTVTLTCRSSTGAVTTSNYANWVQQKPGQAPRGLIGGTNKRAPGTPARFSGSLLGGKAALTLSGAQPEDEAEYYCALWYSNLWVFGGGTKLTVL

SEQ ID NO: 2761 - protein, 109 aa, Synthetic construct
QAVVTQEPSLTVSPGGTVTLTCGSSTGAVTISNYANWVQQKPGQAPRGLIGGTNKRAPGVPARFSGSLLGGKAALTLSGAQPEDEAEYYCALWYSNLWVFGGGTKLTVL

SEQ ID NO: 2762 - protein, 109 aa, Synthetic construct
QAVVTQEPSLTVSPGGTVTLTCRSSTGAVTTSNYANWVQQKPGQAPRGLIGGTNKRAPGTPARFSGSLLGGKAALTLSGVQPEDEAEYYCALWYSNLWVFGGGTKLTVL

SEQ ID NO: 2763 - protein, 109 aa, Synthetic construct
QAVVTQEPSLTVSPGGTVTLTCRSSTGAVTTSNYANWFQQKPGQAPRGLIGGTNKRAPGTPARFSGSLLGGKAALTLSGVQPEDEAEYYCALWYSNLWVFGGGTKLTVL

SEQ ID NO: 2764 - protein, 109 aa, Synthetic construct
QAVVTQEPSLTVSPGGTVTLTCRSSTGAVTTSNYANWVQQKPGQAPRGLIGGTNKRAPWTPARFSGSLLGGKAALTLSGVQPEDEAEYYCALWYSNLWVFGGGTKLTVL

SEQ ID NO: 2765 - protein, 109 aa, Synthetic construct
QAVVTQEPSLTVSPGGTVTLTCRSSTGAVTTSNYANWFQQKPGQAPRGLIGGTNKRAPWTPARFSGSLLGGKAALTLSGVQPEDEAEYYCALWYSNLWVFGGGTKLTVL

SEQ ID NO: 2766 - protein, 109 aa, Synthetic construct
QAVVTQEPSLTVSPGGTVTLTCRSSTGAVTTSNYANWYQQKPGQAPRGLIGGTNKRAPWTPARFSGSLLGGKAALTLSGVQPEDEAEYYCALWYSNLWVFGGGTKLTVL

SEQ ID NO: 2767 - protein, 112 aa, Synthetic construct
QAVVTQESALTTSPGETVTLTCRSSTGAVTTSNYANWVQEKPDHLFTGLIGDTNNRAPGVPARFSGSLIGDKAALTITGAQTGDEAIYFCALWYSNLWVFGGGTKLTVRGQP

SEQ ID NO: 2768 - protein, 109 aa, Synthetic construct
QAVVTQESALTTSPGETVTLTCRSSTGAVTTSNYANWVQEKPDHVFSGLIGGTNKRAPGFPARFSGSLIGDKAALTITGAQTEDEAIYFCVLWYSNHWVFGGGTKLTVL

SEQ ID NO: 2769 - protein, 109 aa, Synthetic construct
QAVVTQESALTTSPGETVTLTCRSTTGAVTTSNYANWVQEKPDHLFTGLIGGTNKRAPGVPARFSGSLIGDKAALTITGAQTEDEAIYFCALWYSDHWVFGGGTKLTVL

SEQ ID NO: 2770 - protein, 109 aa, Synthetic construct
QAVVTQESALTTSPGETVTLTCRSSTGAVTTSNYANWVQEKPDHLFTGLIGGTNKRAPGVPARFSGSLIGDKAALTITGAQTEDEAIYFCALWYSNHWVFGGGTKLTVL

SEQ ID NO: 2771 - protein, 109 aa, Synthetic construct
QAVVTQESALTTSPGETVTLTCRSSTGAVTTSNYANWVQEKPDHLFTGLIGGTNNRAPGVPARFSGSLIGDKAALTITGAQTEDEAIYFCALWYSNHLVEGGGTKLTVL

SEQ ID NO: 2772 - protein, 109 aa, Synthetic construct
QAVVTQEPSLTVSPGGTVTLTCGSSTGAVTASNYANWVQQKPGQCPRGLIGGHNNRPPGVPARFSGSLLGGKAALTLLGAQPEDEAEYYCALWYSDHWVIGGGTKLTVL

SEQ ID NO: 2773 - protein, 109 aa, Synthetic construct
QAVVTQESALTTSPGETVTLTCRSSTGAVTTSNYANWVQEKPDHLFTGLIGGTNNRVSGVPARFSGSLIGDKAALTITGAQTEDEAIYFCALWYSNHWVFGGGTKLEIK

SEQ ID NO: 2774 - protein, 141 aa, Synthetic construct
METDTLLLWVLLLWVPGSTGDYPYDVPDYAGADAVVTQESALTTSPGETVTLTCRSSTGAVTTSNYASWVQEKPDHLFTGLIGGTNNRAPGVPARFSGSLIGDKAALTITGAQTEDEAIYFCALWYSNHWVFGGGTKLTVL

SEQ ID NO: 2775 - protein, 109 aa, Synthetic construct
QAVVTQESALTTSPGETVTLTCRSSTGAVTISNYANWVQEKPDHLFTGLIGGTNNRAPDVPARFSGSLIGDKAALTITGAQTEDEAIYFCALWYSNHLVFGEGTKLTVL

SEQ ID NO: 2776 - protein, 109 aa, Synthetic construct
QAVVTQEPSLTVSPGGTVTLTCRSSTGAVTTSNYANWFQQKPGQAPRTLIGGTNNRAPGVPARFSGSLLGGKAALTLSGAQPEDEAEYYCALWYSNHWVFGGGTKLTVL

SEQ ID NO: 2777 - protein, 109 aa, Synthetic construct
QAVVTQESALTTSPGETVTLTCRSSTGAVSTSNYVNWVQEKPDHLFTGLIGGTKNRVPGVPARFSGSLIGDKAALTITGAQTEDEAIYFCALWYTNHLVFGGGTKLTVL

SEQ ID NO: 2778 - protein, 109 aa, Synthetic construct
QAVVTQESALTTSPGETVTLTCRSSTGAVTSSNHANWVQEKPDHLFTGLIGGTNNRAPGVPARFSGSLIGDKAALTITGAQTEDEAIYFCALWHSNHWVFGGGTKLTVL

SEQ ID NO: 2779 - protein, 109 aa, Synthetic construct
QAVVTQESALTTSPGETVTLTCRSSTGAVTTSNYANWVQEKPDHLFTGLIGGTNKRAPGVPARFSGSLIGDKAALTITGAQTEDEAIYFCALWYSNLWVFGCGTKLTVL

SEQ ID NO: 2780 - protein, 109 aa, Synthetic construct
QAVVTQEPSLTVSPGGTVTLTCGSSTGAVTTSNYASWVQQKPGQAPRGLIGGTNNRAPGVPARFSGSLLGGKAALTISGAQPEDEAEYYCVLWYSDHWVFGGGTKLTVL

SEQ ID NO: 2781 - protein, 109 aa, Synthetic construct
QAVVTQEPSLTVSPGGTVTLTCGSSTGAVTTSNYASWVQQKPGQAFRGLIGGTNNRAPGVPARFSGSLLGGKAALTISGAQPEDEAEYYCVLWYSDHWVFGGGTKLTVL

SEQ ID NO: 2782 - protein, 109 aa, Synthetic construct
QAVVTQEPSLTVSPGGTVTLTCGSSTGAVTTSNYASWVQQKPDHLFRGLIGGTNNRAPGVPARFSGSLLGGKAALTISGAQPEDEAEYYCVLWYSDHWVFGGGTKLTVL

SEQ ID NO: 2783 - protein, 130 aa, Synthetic construct
MALPVTALLLPLALLLHAARPDAVVTQESALTSSPGETVTLTCRSSTGAVTTSNYASWVQEKPDHLFTGLIGGTNNRAPGVPARFSGSLIGDKAALTITGAQTEDEAIYFCVLWYSDHWVFGGGTKLTVL

SEQ ID NO: 2784 - protein, 109 aa, Synthetic construct
DAVVTQESALTSSPGETVTLTCRSSTGAVTTSNYASWVQEKPDHLFTGLIGGTNNRAPGVPARFSGSLIGDKAALTITGAQTEDEAIYFCVLWYSDHWVFGGGTKLTVL

SEQ ID NO: 2785 - protein, 109 aa, Synthetic construct
QAVVTQESALTTSPGETVTLTCRSSTGAVTTSNYANWVQEKPDHLFTGLIGGTNNRAPGVPARFSGSLIGDKAALIITGAQTEDEAIYFCGLWFSNRWVFGGGTKLTVV

SEQ ID NO: 2786 - protein, 109 aa, Synthetic construct
QAVVTQESVLTTSPGETVTLTCRSSTGAVTTSNYANWVQEKPDHLFTGLIGGTNNRAPGVPARFSGSLIGDKAALTITGAQTEDEAIYFCALWYINHFIFGSGTKVTVL

SEQ ID NO: 2787 - protein, 109 aa, Synthetic construct
QAVVTQEPSLTVSPGGTVTLTCRSSTGAVTTSNYASWFQQKPGQAPRTLIYGTNNRAPWTPARFSGSLLGGKAALTLSGAQPEDEAEYYCVLWYSDHWVFGGGTKLTVL

SEQ ID NO: 2788 - protein, 109 aa, Synthetic construct
QAVVTQEPSLTVSPGGTVTLTCRSSTGAVTTSNYASWVQQKPGQAPRGLIGGTNNRAPGVPARFSGSLLGGKAALTISGAQPEDEAEYYCVLWYSDHWVFGGGTKLTVL

SEQ ID NO: 2789 - protein, 109 aa, Synthetic construct
QAVVTQEPSLTVSPGGTVTLTCGSSTGAVTTSNYASWVQQKPDHLFRGLIGGTNNRAPGVPARFSGSLIGDKAALTISGAQPEDEAEYYCVLWYSDHWVFGGGTKLTVL

SEQ ID NO: 2790 - protein, 109 aa, Synthetic construct
QAVVTQEPSLTVSPGGTVTLTCRSSTGAVTTSNYASWVQQKPDHLFRGLIGGTNNRAPGVPARFSGSLIGDKAALTISGAQPEDEAEYYCVLWYSDHWVFGGGTKLTVL

SEQ ID NO: 2791 - protein, 109 aa, Synthetic construct
QAVVTQEPSLTVSPGGTVTLTCRSSTGAVTTSNYASWVQQKPDHLFRGLIGGTNNRAPGVPARFSGSLLGGKAALTISGAQPEDEAEYYCVLWYSDHWVFGGGTKLTVL

SEQ ID NO: 2792 - protein, 109 aa, Synthetic construct
QAVVTQEPSLTVSPGGTVTLTCGSSTGAVTTSNYASWVQEKPDHLFRGLIGGTNNRAPGVPARFSGSLLGGKAALTISGAQPEDEAIYFCVLWYSDHWVFGGGTKLTVL

SEQ ID NO: 2793 - protein, 109 aa, Synthetic construct
QAVVTQEPSLTSSPGGTVTLTCGSSTGAVTTSNYASWVQEKPDHLFRGLIGGTNNRAPGVPARFSGSLLGGKAALTISGAQPEDEAIYFCVLWYSDHWVFGGGTKLTVL

SEQ ID NO: 2794 - protein, 243 aa, Synthetic construct
QAVVTQEPSLTVSPGGTVTLTCGSSTGAVTTSNYASWVQEKPDHLFRGLIGGTNNRAPGVPARFSGSLLGGKAALTISGAQPEDEAIYFCVLWYSDHWVFGGGTKLTVDGGGGGSGGGGSGGGGSGGGGSQVQLQESGPGLVKPSETLSITCTVSGFLLTDYGVNWVRQPPGKGLEWLGVIWGDGITDYNPSLKSRLTVSKDTSKNQVSLKMSSLTAADTARYYCVTGLFDYWGQGTTLTVSS

SEQ ID NO: 2795 - protein, 243 aa, Synthetic construct
QAVVTQEPSLTVSPGGTVTLTCGSSTGAVTTSNYASWVQEKPDHLFRGLIGGTNNRAPGVPARFSGSLLGGKAALTISGAQPEDEAIYFCVLWYSDHWVFGGGTKLTVDGGGGGSGGGGSGGGGSGGGGSQVQLQESGPGLVKPSETLSITCTVSGFLLTDYGVNWVRQPPGKGLEWLGVIWGDGITDYNPSLKSRLTVSKDTSKNQVSLKMSSLTDADTARYYCVTGLFDYWGQGTTLTVSS

SEQ ID NO: 2796 - protein, 243 aa, Synthetic construct
QAVVTQEPSLTVSPGGTVTLTCGSSTGAVTTSNYASWVQEKPDHLFRGLIGGTNNRAPGVPARFSGSLLGGKAALTISGAQPEDEAIYFCVLWYSDHWVFGGGTKLTVDGGGGGSGGGGSGGGGSGGGGSQVQLQQSGPGLVKPSETLSITCTVSGFLLTDYGVNWVRQPPGKGLEWLGVIWGDGITDYNPSLKSRLTVSKDTSKNQVSLKMSSLTDADTARYYCVTGLFDYWGQGTTLTVSS

SEQ ID NO: 2797 - protein, 243 aa, Synthetic construct
QAVVTQEPSLTSSPGGTVTLTCGSSTGAVTTSNYASWVQEKPDHLFRGLIGGTNNRAPGVPARFSGSLLGGKAALTISGAQPEDEAIYFCVLWYSDHWVFGGGTKLTVDGGGGGSGGGGSGGGGSGGGGSQVQLQESGPGLVKPSETLSITCTVSGFLLTDYGVNWVRQPPGKGLEWLGVIWGDGITDYNPSLKSRLTVSKDTSKNQVSLKMSSLTDADTARYYCVTGLFDYWGQGTTLTVSS

SEQ ID NO: 2798 - protein, 243 aa, Synthetic construct
QAVVTQEPSLTSSPGGTVTLTCGSSTGAVTTSNYASWVQEKPDHLFRGLIGGTNNRAPGVPARFSGSLLGGKAALTISGAQPEDEAIYFCVLWYSDHWVFGGGTKLTVDGGGGGSGGGGSGGGGSGGGGSQVQLQQSGPGLVKPSETLSITCTVSGFLLTDYGVNWVRQPPGKGLEWLGVIWGDGITDYNPSLKSRLTVSKDTSKNQVSLKMSSLTDADTARYYCVTGLFDYWGQGTTLTVSS

SEQ ID NO: 2799 - protein, 243 aa, Synthetic construct
QAVVTQEPSLTSSPGGTVTLTCGSSTGAVTTSNYASWVQQKPDHLFRGLIGGTNNRAPGVPARFSGSLLGGKAALTISGAQPEDEAIYFCVLWYSDHWVFGGGTKLTVDGGGGGSGGGGSGGGGSGGGGSQVQLQQSGPGLVKPSETLSITCTVSGFLLTDYGVNWVRQPPGKGLEWLGVIWGDGITDYNPSLKSRLTVSKDTSKNQVSLKMSSLTDADTARYYCVTGLFDYWGQGTTLTVSS

SEQ ID NO: 2800 - protein, 243 aa, Synthetic construct
QAVVTQEPSLTSSPGGTVTLTCGSSTGAVTTSNYASWVQEKPDHLFRGLIGGTNNRAPGVPARFSGSLLGGKAALTISGAQPEDEAEYFCVLWYSDHWVFGGGTKLTVDGGGGGSGGGGSGGGGSGGGGSQVQLQQSGPGLVKPSETLSITCTVSGFLLTDYGVNWVRQPPGKGLEWLGVIWGDGITDYNPSLKSRLTVSKDTSKNQVSLKMSSLTDADTARYYCVTGLFDYWGQGTTLTVSS

SEQ ID NO: 2801 - protein, 243 aa, Synthetic construct
QAVVTQEPSLTSSPGGTVTLTCGSSTGAVTTSNYASWVQEKPDHLFRGLIGGTNNRAPGVPARFSGSLLGGKAALTISGAQPEDEAIYYCVLWYSDHWVFGGGTKLTVDGGGGGSGGGGSGGGGSGGGGSQVQLQQSGPGLVKPSETLSITCTVSGFLLTDYGVNWVRQPPGKGLEWLGVIWGDGITDYNPSLKSRLTVSKDTSKNQVSLKMSSLTDADTARYYCVTGLFDYWGQGTTLTVSS

SEQ ID NO: 2802 - protein, 243 aa, Synthetic construct
QAVVTQEPSLTSSPGGTVTLTCGSSTGAVTTSNYASWVQQKPDHLFRGLIGGTNNRAPGVPARFSGSLLGGKAALTISGAQPEDEAEYFCVLWYSDHWVFGGGTKLTVDGGGGGSGGGGSGGGGSGGGGSQVQLQQSGPGLVKPSETLSITCTVSGFLLTDYGVNWVRQPPGKGLEWLGVIWGDGITDYNPSLKSRLTVSKDTSKNQVSLKMSSLTDADTARYYCVTGLFDYWGQGTTLTVSS

SEQ ID NO: 2803 - protein, 243 aa, Synthetic construct
QAVVTQEPSLTSSPGGTVTLTCGSSTGAVTTSNYASWVQQKPDHLFRGLIGGTNNRAPGVPARFSGSLLGGKAALTISGAQPEDEAIYYCVLWYSDHWVFGGGTKLTVDGGGGGSGGGGSGGGGSGGGGSQVQLQQSGPGLVKPSETLSITCTVSGFLLTDYGVNWVRQPPGKGLEWLGVIWGDGITDYNPSLKSRLTVSKDTSKNQVSLKMSSLTDADTARYYCVTGLFDYWGQGTTLTVSS

SEQ ID NO: 2804 - protein, 243 aa, Synthetic construct
QAVVTQEPSLTSSPGGTVTLTCGSSTGAVTTSNYASWVQEKPDHLFRGLIGGTNNRAPGVPARFSGSLLGGKAALTISGAQPEDEAEYYCVLWYSDHWVFGGGTKLTVDGGGGGSGGGGSGGGGSGGGGSQVQLQQSGPGLVKPSETLSITCTVSGFLLTDYGVNWVRQPPGKGLEWLGVIWGDGITDYNPSLKSRLTVSKDTSKNQVSLKMSSLTDADTARYYCVTGLFDYWGQGTTLTVSS

SEQ ID NO: 2805 - protein, 243 aa, Synthetic construct
QAVVTQEPSLTSSPGGTVTLTCGSSTGAVTTSNYASWVQQKPDHLFRGLIGGTNNRAPGVPARFSGSLLGGKAALTISGAQPEDEAEYYCVLWYSDHWVFGGGTKLTVDGGGGGSGGGGSGGGGSGGGGSQVQLQQSGPGLVKPSETLSITCTVSGFLLTDYGVNWVRQPPGKGLEWLGVIWGDGITDYNPSLKSRLTVSKDTSKNQVSLKMSSLTDADTARYYCVTGLFDYWGQGTTLTVSS

SEQ ID NO: 2806 - protein, 243 aa, Synthetic construct
QAVVTQEPSLTVSPGGTVTLTCGSSTGAVTTSNYASWVQEKPDHLFRGLIGGTNNRAPGVPARFSGSLLGGKAALTISGAQPEDEAIYFCVLWYSDHWVFGGGTKLTVDGGGGGSGGGGSGGGGSGGGGSDVQLQESGPGLVAPSQSLSITCTVSGFLLTDYGVNWVRQSPGKGLEWLGVIWGDGITDYNSALKSRLSVTKDNSKSQVFLKMNSLQSGDSARYYCVTGLFDYWGQGTTLTVSS

SEQ ID NO: 2807 - protein, 243 aa, Synthetic construct
QAVVTQEPSLTSSPGGTVTLTCGSSTGAVTTSNYASWVQEKPDHLFRGLIGGTNNRAPGVPARFSGSLLGGKAALTISGAQPEDEAIYFCVLWYSDHWVFGGGTKLTVDGGGGGSGGGGSGGGGSGGGGSDVQLQESGPGLVAPSQSLSITCTVSGFLLTDYGVNWVRQSPGKGLEWLGVIWGDGITDYNSALKSRLSVTKDNSKSQVFLKMNSLQSGDSARYYCVTGLFDYWGQGTTLTVSS

SEQ ID NO: 2808 - protein, 243 aa, Synthetic construct
QAVVTQEPSLTSSPGGTVTLTCGSSTGAVTTSNYASWVQEKPDHLFRGLIGGTNNRAPGVPARFSGSLDGGKAALTISGAQPEDEAIYFCVLWYSDHWVFGGGTKLTVSGGGGGSGGGGSGGGGSGGGGSQVQLQESGPGLVKPSETLSITCTVSGFLLTDYGVNWVRQPPGKGLEWLGVIWGDGITDYNPSLKSRLTVSKDTSKNQVSLKMSSLTDADTARYYCVTGLFDYWGQGTTLTVSS

SEQ ID NO: 2809 - protein, 109 aa, Synthetic construct
QAVVTQEPSLTSSPGGTVTLTCRSSTGAVTTSNYASWVQEKPDHLFRGLIGGTNNRAPGVPARFSGSLLGGKAALTISGAQPEDEAIYFCVLWYSDHWVFGGGTKLTVL

SEQ ID NO: 2810 - protein, 109 aa, Synthetic construct
QAVVTQEPSLTSSPGGTVTLTCGSSTGAVTTSNYASWVQEKPDHLFRGLIGGTNNRAPGVPARFSGSLDGGKAALTISGAQPEDEAIYFCVLWYSDHWVFGGGTKLTVL

SEQ ID NO: 2811 - protein, 242 aa, Synthetic construct
QAVVTQEPSLTVSPGGTVTLTCGSSTGAVTTSNYASWVQEKPDHLFRGLIGGTNNRAPGVPARFSGSLLGGKAALTISGAQPEDEAIYFCVLWYSDHWVFGGGTKLTVGGGGGSGGGGSGGGGSGGGGSQVQLQESGPGLVKPSETLSITCTVSGFLLTDYGVNWVRQPPGKGLEWLGVIWGDGITDYNPSLKSRLTVSKDTSKNQVSLKMSSLTAADTARYYCVTGLFDYWGQGTTLTVSS

SEQ ID NO: 2812 - protein, 242 aa, Synthetic construct
QAVVTQEPSLTVSPGGTVTLTCGSSTGAVTTSNYASWVQEKPDHLFRGLIGGTNNRAPGVPARFSGSLLGGKAALTISGAQPEDEAIYFCVLWYSDHWVFGGGTKLTVGGGGGSGGGGSGGGGSGGGGSQVQLQESGPGLVKPSETLSITCTVSGFLLTDYGVNWVRQPPGKGLEWLGVIWGDGITDYNPSLKSRLTVSKDTSKNQVSLKMSSLTDADTARYYCVTGLFDYWGQGTTLTVSS

SEQ ID NO: 2813 - protein, 243 aa, Synthetic construct
QAVVTQEPSLTSSPGGTVTLTCGSSTGAVTTSNYASWVQEKPDHLFRGLIGGTNNRAPGVPARFSGSLDGGKAALTISGAQPEDEAIYFCVLWYSDHWVFGGGTKLTVSGGGGGSGGGGSGGGGSGGGGSDVQLQESGPGLVAPSQSLSITCTVSGFLLTDYGVNWVRQSPGKGLEWLGVIWGDGITDYNSALKSRLSVTKDNSKSQVFLKMNSLQSGDSARYYCVTGLFDYWGQGTTLTVSS

SEQ ID NO: 2814 - protein, 243 aa, Synthetic construct
QAVVTQEPSLTSSPGGTVTLTCGSSTGAVTTSNYASWVQEKPDHLFRGLIGGTNNRAPGVPARFSGSLDGGKAALTISGAQPEDEAIYFCVLWYSDHWVFGGGTKLTVSGGGGGSGGGGSGGGGSGGGGSQVQLQESGPGLVKPSETLSITCTVSGFLLTDYGVNWVRQPPGKGLEWLGVIWGDGITDYNPSLKSRLTVSKDTSKNQVSLKMSSLTSADTARYYCVTGLFDYWGQGTTLTVSS

SEQ ID NO: 2815 - protein, 243 aa, Synthetic construct
QAVVTQEPSLTSSPGGTVTLTCGSSTGAVTTSNYASWVQEKPDHLFRGLIGGTNNRAPGVPARFSGSLLGGKAALTISGAQPEDEAIYFCVLWYSDHWVFGGGTKLTVSGGGGGSGGGGSGGGGSGGGGSQVQLQESGPGLVKPSETLSITCTVSGFLLTDYGVNWVRQPPGKGLEWLGVIWGDGITDYNPSLKSRLTVSKDTSKNQVSLKMSSLTAADTARYYCVTGLFDYWGQGTTLTVSS

SEQ ID NO: 2816 - protein, 109 aa, Synthetic construct
QAVVTQEPSLTVSPGGTVTLTCRSSTGAVTTSNYASWVQEKPDHLFRGLIGGTNNRAPGVPARFSGSLLGGKAALTISGAQPEDEAIYFCVLWYSDHWVFGGGTKLTVL

SEQ ID NO: 2817 - protein, 109 aa, Synthetic construct
QAVVTQEPSLTVSPGGTVTLTCGSSTGAVTTSNYASWVQEKPGQAFRGLIGGTNNRAPGVPARFSGSLLGGKAALTISGAQPEDEAIYFCVLWYSDHWVFGGGTKLTVL

SEQ ID NO: 2818 - protein, 109 aa, Synthetic construct
QAVVTQEPSLTVSPGGTVTLTCGSSTGAVTTSNYASWVQEKPGQAPRGLIGGTNNRAPGVPARFSGSLLGGKAALTISGAQPEDEAIYFCVLWYSDHWVFGGGTKLTVL

SEQ ID NO: 2819 - protein, 109 aa, Synthetic construct
DAVVTQESALTTSPGETVTLTCRSSTGAVTTSNYANWVQEKPDHLFTGLIGGTNNRAPGVPARFSGSLIGDKAALTITGAQTEDEAIYFCALWYSNHWVFGGGTKLTVL

SEQ ID NO: 2820 - protein, 110 aa, Synthetic construct
QAVVTQEPSLTSSPGGTVTLTCGSSTGAVTTSNYASWVQEKPDHLFRGLIGGTNNRAPGVPARFSGSLDGGKAALTISGAQPEDEAIYFCVLWYSDHWVFGGGTKLTVSG

SEQ ID NO: 2821 - protein, 110 aa, Synthetic construct
QAVVTQEPSLTVSPGGTVTLTCGSSTGAVTTSNYASWVQEKPDHLFRGLIGGTNNRAPGVPARFSGSLLGGKAALTISGAQPEDEAIYFCVLWYSDHWVFGGGTKLTVDG

SEQ ID NO: 2822 - protein, 242 aa, Synthetic construct
DVQLQESGPGLVAPSQSLSITCTVSGFLLTDYGVNWVRQSPGKGLEWLGVIWGDGITDYNSALKSRLSVTKDNSKSQVFLKMNSLQSGDSARYYCVTGLFDYWGQGTTLTVSSGGGGSGGGGSGGGGSGGGGSDAVVTQESALTSSPGETVTLTCRSSTGAVTTSNYASWVQEKPDHLFTGLIGGTNNRAPGVPARFSGSLIGDKAALTITGAQTEDEAIYFCVLWYSDHWVFGGGTKLTVL

SEQ ID NO: 2823 - protein, 242 aa, Synthetic construct
QVQLQQSGPGLVKPSETLSITCTVSGFLLTDYGVNWVRQPPGKGLEWLGVIWGDGITDYNPSLKSRLTVSKDTSKNQVSLKMSSLTAADTARYYCVTGLFDYWGQGTTLTVSSGGGGSGGGGSGGGGSGGGGSDAVVTQESALTSSPGETVTLTCRSSTGAVTTSNYASWVQEKPDHLFTGLIGGTNNRAPGVPARFSGSLIGDKAALTITGAQTEDEAIYFCVLWYSDHWVFGGGTKLTVL

SEQ ID NO: 2824 - protein, 478 aa, Synthetic construct
QAVVTQEPSLTVSPGGTVTLTCGSSTGAVTTSNYASWVQEKPDHLFRGLIGGTNNRAPGVPARFSGSLLGGKAALTISGAQPEDEAIYFCVLWYSDHWVFGGGTKLTVDGGGGGSGGGGSGGGGSGGGGSQVQLQESGPGLVKPSETLSITCTVSGFLLTDYGVNWVRQPPGKGLEWLGVIWGDGITDYNPSLKSRLTVSKDTSKNQVSLKMSSLTDADTARYYCVTGLFDYWGQGTTLTVSSESKYGPPCPPCPDFWVLVVVGGVLACYSLLVTVAFIIFWVRSKRSRLLHSDYMNMTPRRPGPTRKHYQPYAPPRDFAAYRSKRGRKKLLYIFKQPFMRPVQTTQEEDGCSCRFPEEEEGGCELRVKFSRSADAPAYKQGQNQLYNELNLGRREEYDVLDKRRGRDPEMGGKPRRKNPQEGLYNELQKDKMAEAYSEIGMKGERRRGKGHDGLYQGLSTATKDTYDALHMQALPPR

SEQ ID NO: 2825 - protein, 478 aa, Synthetic construct
QAVVTQEPSLTVSPGGTVTLTCGSSTGAVTTSNYASWVQEKPDHLFRGLIGGTNNRAPGVPARFSGSLLGGKAALTISGAQPEDEAIYFCVLWYSDHWVFGGGTKLTVDGGGGGSGGGGSGGGGSGGGGSQVQLQQSGPGLVKPSETLSITCTVSGFLLTDYGVNWVRQPPGKGLEWLGVIWGDGITDYNPSLKSRLTVSKDTSKNQVSLKMSSLTDADTARYYCVTGLFDYWGQGTTLTVSSESKYGPPCPPCPDFWVLVVVGGVLACYSLLVTVAFIIFWVRSKRSRLLHSDYMNMTPRRPGPTRKHYQPYAPPRDFAAYRSKRGRKKLLYIFKQPFMRPVQTTQEEDGCSCRFPEEEEGGCELRVKFSRSADAPAYKQGQNQLYNELNLGRREEYDVLDKRRGRDPEMGGKPRRKNPQEGLYNELQKDKMAEAYSEIGMKGERRRGKGHDGLYQGLSTATKDTYDALHMQALPPR

SEQ ID NO: 2826 - protein, 478 aa, Synthetic construct
QAVVTQEPSLTSSPGGTVTLTCGSSTGAVTTSNYASWVQEKPDHLFRGLIGGTNNRAPGVPARFSGSLLGGKAALTISGAQPEDEAIYFCVLWYSDHWVFGGGTKLTVDGGGGGSGGGGSGGGGSGGGGSQVQLQESGPGLVKPSETLSITCTVSGFLLTDYGVNWVRQPPGKGLEWLGVIWGDGITDYNPSLKSRLTVSKDTSKNQVSLKMSSLTDADTARYYCVTGLFDYWGQGTTLTVSSESKYGPPCPPCPDFWVLVVVGGVLACYSLLVTVAFIIFWVRSKRSRLLHSDYMNMTPRRPGPTRKHYQPYAPPRDFAAYRSKRGRKKLLYIFKQPFMRPVQTTQEEDGCSCRFPEEEEGGCELRVKFSRSADAPAYKQGQNQLYNELNLGRREEYDVLDKRRGRDPEMGGKPRRKNPQEGLYNELQKDKMAEAYSEIGMKGERRRGKGHDGLYQGLSTATKDTYDALHMQALPPR

SEQ ID NO: 2827 - protein, 478 aa, Synthetic construct
QAVVTQEPSLTSSPGGTVTLTCGSSTGAVTTSNYASWVQEKPDHLFRGLIGGTNNRAPGVPARFSGSLLGGKAALTISGAQPEDEAIYFCVLWYSDHWVFGGGTKLTVDGGGGGSGGGGSGGGGSGGGGSQVQLQQSGPGLVKPSETLSITCTVSGFLLTDYGVNWVRQPPGKGLEWLGVIWGDGITDYNPSLKSRLTVSKDTSKNQVSLKMSSLTDADTARYYCVTGLFDYWGQGTTLTVSSESKYGPPCPPCPDFWVLVVVGGVLACYSLLVTVAFIIFWVRSKRSRLLHSDYMNMTPRRPGPTRKHYQPYAPPRDFAAYRSKRGRKKLLYIFKQPFMRPVQTTQEEDGCSCRFPEEEEGGCELRVKFSRSADAPAYKQGQNQLYNELNLGRREEYDVLDKRRGRDPEMGGKPRRKNPQEGLYNELQKDKMAEAYSEIGMKGERRRGKGHDGLYQGLSTATKDTYDALHMQALPPR

SEQ ID NO: 2828 - protein, 109 aa, Synthetic construct
QAVVTQEPSLTVSPGGTVTLTCGSSTGAVTTSNYANWVQEKPDHLFRGLIGGTNKRAPGTPARFSGSLLGDKAALTISGAQPEDEAEYYCALWYSNLWVFGGGTKLTVL

SEQ ID NO: 2829 - protein, 109 aa, Synthetic construct
DAVVTQESALTSSPGETVTLTCRSSTGAVTTSNYASWVQEKPDHLFTGLIGGTNNRAPGVPARFSGSLIGGKAALTITGAQTEDEAIYFCVLWYSDHWVFGGGTKLTVL

SEQ ID NO: 2830 - protein, 109 aa, Synthetic construct
QTVVTQEPSLTVSPGGTVTLTCRSSTGAVTTSNYANWFQQKPGQAPRGLIGGTNKRAPGTPARFSGSLLGGKAALTLSGAQPEDEAEYYCALWYANRWVFGGGTKLTVL

SEQ ID NO: 2831 - protein, 109 aa, Synthetic construct
QTVVTQEPSLTVSPGGTVTLTCRSSTGAVTTSNYANWFQQKPGQAPRGLIGGTNKRAPGTPARFSGSLLGGKAALTLSGAQPEDEAEYYCALWYKGYWVFGGGTKLTVL

SEQ ID NO: 2832 - protein, 109 aa, Synthetic construct
QTVVTQEPSLTVSPGGTVTLTCRSSTGAVTTSNYANWFQQKPGQAPRGLIGGTNKRAPGTPARFSGSLLGGKAALTLSGAQPEDEAEYYCALWYDGTWVFGGGTKLTVL

SEQ ID NO: 2833 - protein, 109 aa, Synthetic construct
QTVVTQEPSLTVSPGGTVTLTCRSSTGAVTTSNYANWFQQKPGQAPRGLIGGTNKRAPGTPARFSGSLLGGKAALTLSGAQPEDEAEYYCALWYDGKWVFGGGTKLTVL

SEQ ID NO: 2834 - protein, 109 aa, Synthetic construct
QTVVTQEPSLTVSPGGTVTLTCRSSTGAVTTSNYANWFQQKPGQAPRGLIGGTNKRAPGTPARFSGSLLGGKAALTLSGAQPEDEAEYYCALWYDGWWVFGGGTKLTVL

SEQ ID NO: 2835 - protein, 109 aa, Synthetic construct
QTVVTQEPSLTVSPGGTVTLTCRSSTGAVTTSNYANWFQQKPGQAPRGLIGGTNKRAPGTPARFSGSLLGGKAALTLSGAQPEDEAEYYCALWYKQRWVFGGGTKLTVL

SEQ ID NO: 2836 - protein, 109 aa, Synthetic construct
QTVVTQEPSLTVSPGGTVTLTCRSSTGAVTTSNYANWFQQKPGQAPRGLIGGTNKRAPGTPARFSGSLLGGKAALTLSGAQPEDEAEYYCALWYNQHWVFGGGTKLTVL

SEQ ID NO: 2837 - protein, 109 aa, Synthetic construct
QAVVTQEPSLTVSPGGTVTLTCGSSTGAVTTSNYANWVQQKPGKSPRGLIGGTNKRAPGVPARFSGSLLGGKAALTISGAQPEDEADYYCALWYSNHWVFGCGTKLEIK

SEQ ID NO: 2838 - protein, 109 aa, Synthetic construct
QAVVTQEPSLTVSPGGTVTLTCGSSTGAVTTSNYANWVQQKPGQAFRGLIGGTNKRAPGVPARFSGSLLGGKAALTISGAQPEDEADYYCALWYSNHWVFGGGTKLEIK

SEQ ID NO: 2839 - protein, 109 aa, Synthetic construct
QAVVTQEPSLTVSPGGTVTLTCGSSTGAVTTSNYANWVQQKPGQAFRGLIGGTNKRAPGVPARFSGSLLGGKAALTISGAQPEDEADYYCALWYSNHWVFGCGTKLEIK

SEQ ID NO: 2840 - protein, 109 aa, Synthetic construct
QAVVTQEPSLTVSPGGTVTLTCGSSTGAVTTSNYANWVQQKPGQCFRGLIGGTNKRAPGVPARFSGSLLGGKAALTISGAQPEDEADYYCALWYSNHWVFGEGTKLEIK

SEQ ID NO: 2841 - protein, 109 aa, Synthetic construct
QAVVTQEPSLTVSPGGTVTLTCGSSTGAVTTSNYANWVQQKPGKSPRGLIGGTNKRAPGVPARFSGSLLGGKAALTISGAQPEDEADYYCALWYSNHWVFGGGTKLEIK

SEQ ID NO: 2842 - protein, 109 aa, Synthetic construct
QAVVTQEPSLTVSPGGTVTLTCRSSTGAVTTSNYANWVQQKPGQAPRGLIGGTNKRAPWTPARFSGSLLGGKAALTITGAQAEDEADYYCALWYSNLWVFGCGTKLTVL

SEQ ID NO: 2843 - protein, 109 aa, Synthetic construct
QAVVTQEPSFSVSPGGTVTLTCRSSTGAVTTSNYANWVQQTPGQAFRGLIGGTNKRAPGVPARFSGSILGNKAALTITGAQADDESIYFCALWYSNLWVFGCGTKLTVL

SEQ ID NO: 2844 - protein, 109 aa, Synthetic construct
QAVVTQEPSFSVSPGGTVTLTCRSSTGAVTTSNYANWVQQTPGQAFRGLIGGTNKRAPGVPARFSGSILGNKAALTITGAQADDESDYYCALWYSNLWVFGCGTKLTVL

SEQ ID NO: 2845 - protein, 109 aa, Synthetic construct
QAVVTQEPSLTVSPGGTVTLTCGSSTGAVTTSNYANWVQEKPGQAFRGLIGGTNKRAPGTPARFSGSLLGGKAALTLSGAQPEDEAEYYCALWYSNLWVFGCGTKLTVL

SEQ ID NO: 2846 - protein, 109 aa, Synthetic construct
QAVVTQEPSLTVSPGGTVTLTCGSSTGAVTTSNYANWVQQKPGQAFRGLIGGTNKRAPGVPARFSGSLLGGKAALTISGAQPEDEADYYCALWYSNHWVFGCGTKLTVL

SEQ ID NO: 2847 - protein, 109 aa, Synthetic construct
QAVVTQESALTTSPGETVTLTCRSSTGAVTTSNYANWVQEKPDHLFTGLIGGPNNRAPGVPARFSGSLIGDKAALTITGAQTEDEAIYFCALWYSNHWVFGGGTKLTVL

SEQ ID NO: 2848 - protein, 109 aa, Synthetic construct
DAVVTQESALTTSPGETVTLTCRSSTGAVTTNNYANWVQEKPDHLFTGLIGGTNNRAPGVPARFSGSLIGDKAALTITGAQTEDEAIYFCALWYSNHLVFGGGTKLTVL

SEQ ID NO: 2849 - protein, 109 aa, Synthetic construct
DAVVTQESALTTSPGETVTLTCRSSTGAVSTSNYANWVQEKPDHLFTGLIGGTNNRAPGVPARFSGSLIGDKAALTITGAQTEDEAIYFCALWYSNHWVFGGGTKLTVL

SEQ ID NO: 2850 - protein, 109 aa, Synthetic construct
DAVVTQESALTTSPGETVTLTCRSSTGAVTTGNYANWVQEKPDHLFTGLIGGIKNRVPGVPARFSGSLIGDRAALTITGAQTEDEAIYFCALWYSNHWVFGGGTKLTVL

SEQ ID NO: 2851 - protein, 109 aa, Synthetic construct
DAVVTQESALTTSPGETVTLTCRSSTGAVTTSNYANWVQEKPDHLFTGLIGGINNRAPGVPARFSGSLIGDKAALTITGAQTEDEAIYFCALWYSNHWVFGGGTKLTVL

SEQ ID NO: 2852 - protein, 109 aa, Synthetic construct
DAVVTQESALTTSPGETVTLTCRSSTGAVTTSNYANWVQEKPDHLFTGLIGGINNRVPGVPARFSGSLIGDKAALTITGAQTEDEAIYFCALWYSNHWVFGGGTKVTVL

SEQ ID NO: 2853 - protein, 109 aa, Synthetic construct
DAVVTQESALTTSPGETVTVTCRSSTGAVTTSNYANWVQEKPDHLFTGLIGGINNRAPGVPARFSGSLIGDKAALTITGAQTEDEAIYFCALWYSNHWVFGGGTKLTVL

SEQ ID NO: 2854 - protein, 109 aa, Synthetic construct
QAVVTQESALTTSPGETVTLTCRSSTGAVTTSNYANWVQEKPDHLFTGLIGDTNNRAPGVPARFSGSLIGDKAALTITGAQTEDEAIYFCALWCSNHWVFGGGTKLTVL

SEQ ID NO: 2855 - protein, 113 aa, Synthetic construct
QAVVQAVVTQESALTTSPGETVTLTCRSSTGAVTTSNYANWVQEKPDHLFTGLIGDTNNRAPGVPARFSGSLIGDKAALTITGAQTEDEAIYFCALWCSNHWVFGGGTKLTVL

SEQ ID NO: 2856 - protein, 110 aa, Synthetic construct
QAVVTQESALTTSPGETVTLTCRSSTGAVTTSNYANWVQEKPDRLFNGLIGGTNNRAPGVPARFSGSLIGDKAALTITGAQPEDEAIYFCALWYSNHFWVFGGGTKLTVL

SEQ ID NO: 2857 - protein, 108 aa, Synthetic construct
QAVVTQESALTTSPGETVTLTCRSSTGAITTNNFANWVQEKPDHLFTGLIGDTNNRVPGVPARFSGSLIGDKAALTITGAQTEDEAIYFCALWYNNWVFGGGTKLTVL

SEQ ID NO: 2858 - protein, 129 aa, Synthetic construct
MAWISLILSAISQAGVTQPGETVTTLTLLALSSGESALTTSCRSSTGAVTTSNYANWVQEKPDHLFIGLIGGTNNRVTGVPARFSGSLIGDKAALTITGAQTEDEAIYFCALWYSDHWVFGGGTKLTVL

SEQ ID NO: 2859 - protein, 128 aa, Synthetic construct
MAWISLILSLLALSSGAISQAGVTQESALTTSPGETVTLTCRSSTGAVTTSNYANWVQEKPDHLFIGLIGGTNNRVTGVPARFSGSLIGDKAALTITGAQTEDEAIYFCALWYSDHWVFGGGTKLTVL

SEQ ID NO: 2860 - protein, 109 aa, Synthetic construct
QTVVTQEPSLTVSPGGTVTLTCRSSTGAVTTSNYANWVQQTPGQAPRTLIGGTNNRVTGVPARFSGSILGDKAALTITGAQADDEADYFCALWYSDHWVFGGGTKLTVL

SEQ ID NO: 2861 - protein, 109 aa, Synthetic construct
QTVVTQEPSLTVSPGGTVTLTCRSSTGAVTTSNYANWVQQTPGQAPRGLIGGTNNRVTGVPARFSGSLLGDKAALTITGAQADDEADYFCALWYSDHWVFGGGTKLTVL

SEQ ID NO: 2862 - protein, 109 aa, Synthetic construct
QAGVTQESALTTSPGETVTLTCRSSTGAVTTSNYANWVQEKPDHLFIGLIGGTNNRVTGVPARFSGSLIGDKAALTITGAQTEDEAIYFCALWYSDHWVFGGGTKLTVL

SEQ ID NO: 2863 - protein, 109 aa, Synthetic construct
QAVLTQESALTTSPGETVTLTCRSSTGAVTTSNYANWVQEKPDHLFTGLIGGTNNRVPGVPARFSGSLIGDKAALTITGAQTEDEAIYFCVLWHSNHWVFGGGTKLTVL

SEQ ID NO: 2864 - protein, 278 aa, Synthetic construct
MTQELHSPHHLVEQSYSCRSSTGAVTTSNYANWVQEKPDHLFTGLIGGTSNRAPGVPVRFSGSLIGDKAALTITGAQTEDDAMYFCALWYSTHWVLGGGTKLLSSSSGGGGSGGGGGGSSRSSLEVKLMESGAELIRPGTSVKISCKTSGYTFTDFWLGWAKQRPGHGLEWIGNIYPGRDYTNFNEKFKGRAILTADTSFTTAYMQLSGLTSEDSAVYFCAREGLRVPYFAMDYWGQGTSVTVSSAKTTAPSVTSGQAGQHHHHHHGAYPYDVPDYAS

SEQ ID NO: 2865 - protein, 109 aa, Synthetic construct
QAVVTQESALTTSPGETVTLTCRSSTGAVTTTNYANWVQEKPDHFFTGLIGGTNNRPPGVPPRFSGSLIGDKAALTITGAQTEDEAIYFCALWYSHRWVFGGGTKLTVL

SEQ ID NO: 2866 - protein, 109 aa, Synthetic construct
QAVVTQESALTTSPGETVTLTCRSSTGAVTTSNYANWVQEKPDHLFTGLIDGTNNRAPGVPARFSGSLIGDKAALTITGAQTEDEAIYFCALLYSNHWVFGGGTKLTVL

SEQ ID NO: 2867 - protein, 109 aa, Synthetic construct
DAVVTQESALTTSPGETVTLTCRSSTGTVTTSNYANWVQEKPDHLFTGLIAGTNNRAPGVPARFSGSLIGDKAVLTITGAQTEDEAIYFCALWYSNHWVFGGGTKLTVL

SEQ ID NO: 2868 - protein, 109 aa, Synthetic construct
DAVVTQESALTTSPGETVTLTCRSSTGAVTTSNYANWVQEKPDHLFTGLIGGTNNRAPGVPARFSGSLIGDKAALTITGAQTEDEAIYFCALWYSNHLVFGGGTKLTVL

SEQ ID NO: 2869 - protein, 109 aa, Synthetic construct
DAVVTQESALTTSPGETVTLTCRSSTGTVTTSNYANWVQEKPDHLFTGLIAGTNNRAPGVPARFSGSLIGDKAALTITGAQTEDEAIYFCALWYSNHWVFGGGTKLTVL

SEQ ID NO: 2870 - protein, 109 aa, Synthetic construct
EAVVTQEPSLTVSPGGTVTLTCRSSTGAVTTSNYANWVQEKPGQLPRGLIGGTNKRAPWVPARFSGSLLGGKAALTLSGAQPEDEAEYFCALWYSNLWVFGGGTKLTVL

SEQ ID NO: 2871 - protein, 109 aa, Synthetic construct
QAVVTQESALTTSPGETVTLTCRSSTGAVTTSNYANWVQEKPDHLFTGLIGTTNNRAPGVPARFSGSLIGDKAALTITGAQTEDEAIYFCALWYSNHLVFGGGTKLTVL

SEQ ID NO: 2872 - protein, 109 aa, Synthetic construct
QAVVTQEPSFSVSPGGTVTLTCRSSTGAVTASNYANWVQQKPGQAFRGLIGGTNKRAPGVPARFSGSLIGDKAALTITGAQADDESIYFCALWYSNLWVFGGGTKLTVL

SEQ ID NO: 2873 - protein, 109 aa, Synthetic construct
QAVVTQEPSFSVSPGGTVTLTCRSSTGAVTDSNYANWVQQKPGQAFRGLIGGTNKRAPGVPARFSGSLIGDKAALTITGAQADDESIYFCALWYSNLWVFGGGTKLTVL

SEQ ID NO: 2874 - protein, 109 aa, Synthetic construct
QAVVTQEPSFSVSPGGTVTLTCRSSTGAVTESNYANWVQQKPGQAFRGLIGGTNKRAPGVPARFSGSLIGDKAALTITGAQADDESIYFCALWYSNLWVFGGGTKLTVL

SEQ ID NO: 2875 - protein, 109 aa, Synthetic construct
QAVVTQEPSFSVSPGGTVTLTCRSSTGAVTFSNYANWVQQKPGQAFRGLIGGTNKRAPGVPARFSGSLIGDKAALTITGAQADDESIYFCALWYSNLWVFGGGTKLTVL

SEQ ID NO: 2876 - protein, 109 aa, Synthetic construct
QAVVTQEPSFSVSPGGTVTLTCRSSTGAVTGSNYANWVQQKPGQAFRGLIGGTNKRAPGVPARFSGSLIGDKAALTITGAQADDESIYFCALWYSNLWVFGGGTKLTVL

SEQ ID NO: 2877 - protein, 109 aa, Synthetic construct
QAVVTQEPSFSVSPGGTVTLTCRSSTGAVTHSNYANWVQQKPGQAFRGLIGGTNKRAPGVPARFSGSLIGDKAALTITGAQADDESIYFCALWYSNLWVFGGGTKLTVL

SEQ ID NO: 2878 - protein, 109 aa, Synthetic construct
QAVVTQEPSFSVSPGGTVTLTCRSSTGAVTKSNYANWVQQKPGQAFRGLIGGTNKRAPGVPARFSGSLIGDKAALTITGAQADDESIYFCALWYSNLWVFGGGTKLTVL

SEQ ID NO: 2879 - protein, 109 aa, Synthetic construct
QAVVTQEPSFSVSPGGTVTLTCRSSTGAVTLSNYANWVQQKPGQAFRGLIGGTNKRAPGVPARFSGSLIGDKAALTITGAQADDESIYFCALWYSNLWVFGGGTKLTVL

SEQ ID NO: 2880 - protein, 109 aa, Synthetic construct
QAVVTQEPSFSVSPGGTVTLTCRSSTGAVTMSNYANWVQQKPGQAFRGLIGGTNKRAPGVPARFSGSLIGDKAALTITGAQADDESIYFCALWYSNLWVFGGGTKLTVL

SEQ ID NO: 2881 - protein, 109 aa, Synthetic construct
QAVVTQEPSFSVSPGGTVTLTCRSSTGAVTNSNYANWVQQKPGQAFRGLIGGTNKRAPGVPARFSGSLIGDKAALTITGAQADDESIYFCALWYSNLWVFGGGTKLTVL

SEQ ID NO: 2882 - protein, 109 aa, Synthetic construct
QAVVTQEPSFSVSPGGTVTLTCRSSTGAVTPSNYANWVQQKPGQAFRGLIGGTNKRAPGVPARFSGSLIGDKAALTITGAQADDESIYFCALWYSNLWVFGGGTKLTVL

SEQ ID NO: 2883 - protein, 109 aa, Synthetic construct
QAVVTQEPSFSVSPGGTVTLTCRSSTGAVTQSNYANWVQQKPGQAFRGLIGGTNKRAPGVPARFSGSLIGDKAALTITGAQADDESIYFCALWYSNLWVFGGGTKLTVL

SEQ ID NO: 2884 - protein, 109 aa, Synthetic construct
QAVVTQEPSFSVSPGGTVTLTCRSSTGAVTRSNYANWVQQKPGQAFRGLIGGTNKRAPGVPARFSGSLIGDKAALTITGAQADDESIYFCALWYSNLWVFGGGTKLTVL

SEQ ID NO: 2885 - protein, 109 aa, Synthetic construct
QAVVTQEPSFSVSPGGTVTLTCRSSTGAVTVSNYANWVQQKPGQAFRGLIGGTNKRAPGVPARFSGSLIGDKAALTITGAQADDESIYFCALWYSNLWVFGGGTKLTVL

SEQ ID NO: 2886 - protein, 109 aa, Synthetic construct
QAVVTQEPSFSVSPGGTVTLTCRSSTGAVTYSNYANWVQQKPGQAFRGLIGGTNKRAPGVPARFSGSLIGDKAALTITGAQADDESIYFCALWYSNLWVFGGGTKLTVL

SEQ ID NO: 2887 - protein, 109 aa, Synthetic construct
QAVVTQEPSFSVSPGGTVTLTCRSSTGAVTTSNYANWVQQKPGQAFRGLIGGTNKRAPGVPARFSGSLIGDKAALTITGAQADDESIYFCAAWYSNLWVFGGGTKLTVL

SEQ ID NO: 2888 - protein, 109 aa, Synthetic construct
QAVVTQEPSFSVSPGGTVTLTCRSSTGAVTTSNYANWVQQKPGQAFRGLIGGTNKRAPGVPARFSGSLIGDKAALTITGAQADDESIYFCACWYSNLWVFGGGTKLTVL

SEQ ID NO: 2889 - protein, 109 aa, Synthetic construct
QAVVTQEPSFSVSPGGTVTLTCRSSTGAVTTSNYANWVQQKPGQAFRGLIGGTNKRAPGVPARFSGSLIGDKAALTITGAQADDESIYFCADWYSNLWVFGGGTKLTVL

SEQ ID NO: 2890 - protein, 109 aa, Synthetic construct
QAVVTQEPSFSVSPGGTVTLTCRSSTGAVTTSNYANWVQQKPGQAFRGLIGGTNKRAPGVPARFSGSLIGDKAALTITGAQADDESIYFCAEWYSNLWVFGGGTKLTVL

SEQ ID NO: 2891 - protein, 109 aa, Synthetic construct
QAVVTQEPSFSVSPGGTVTLTCRSSTGAVTTSNYANWVQQKPGQAFRGLIGGTNKRAPGVPARFSGSLIGDKAALTITGAQADDESIYFCAFWYSNLWVFGGGTKLTVL

SEQ ID NO: 2892 - protein, 109 aa, Synthetic construct
QAVVTQEPSFSVSPGGTVTLTCRSSTGAVTTSNYANWVQQKPGQAFRGLIGGTNKRAPGVPARFSGSLIGDKAALTITGAQADDESIYFCAGWYSNLWVFGGGTKLTVL

SEQ ID NO: 2893 - protein, 109 aa, Synthetic construct
QAVVTQEPSFSVSPGGTVTLTCRSSTGAVTTSNYANWVQQKPGQAFRGLIGGTNKRAPGVPARFSGSLIGDKAALTITGAQADDESIYFCAIWYSNLWVFGGGTKLTVL

SEQ ID NO: 2894 - protein, 109 aa, Synthetic construct
QAVVTQEPSFSVSPGGTVTLTCRSSTGAVTTSNYANWVQQKPGQAFRGLIGGTNKRAPGVPARFSGSLIGDKAALTITGAQADDESIYFCAKWYSNLWVFGGGTKLTVL

SEQ ID NO: 2895 - protein, 109 aa, Synthetic construct
QAVVTQEPSFSVSPGGTVTLTCRSSTGAVTTSNYANWVQQKPGQAFRGLIGGTNKRAPGVPARFSGSLIGDKAALTITGAQADDESIYFCAMWYSNLWVFGGGTKLTVL

SEQ ID NO: 2896 - protein, 109 aa, Synthetic construct
QAVVTQEPSFSVSPGGTVTLTCRSSTGAVTTSNYANWVQQKPGQAFRGLIGGTNKRAPGVPARFSGSLIGDKAALTITGAQADDESIYFCANWYSNLWVFGGGTKLTVL

SEQ ID NO: 2897 - protein, 109 aa, Synthetic construct
QAVVTQEPSFSVSPGGTVTLTCRSSTGAVTTSNYANWVQQKPGQAFRGLIGGTNKRAPGVPARFSGSLIGDKAALTITGAQADDESIYFCAPWYSNLWVFGGGTKLTVL

SEQ ID NO: 2898 - protein, 109 aa, Synthetic construct
QAVVTQEPSFSVSPGGTVTLTCRSSTGAVTTSNYANWVQQKPGQAFRGLIGGTNKRAPGVPARFSGSLIGDKAALTITGAQADDESIYFCARWYSNLWVFGGGTKLTVL

SEQ ID NO: 2899 - protein, 109 aa, Synthetic construct
QAVVTQEPSFSVSPGGTVTLTCRSSTGAVTTSNYANWVQQKPGQAFRGLIGGTNKRAPGVPARFSGSLIGDKAALTITGAQADDESIYFCASWYSNLWVFGGGTKLTVL

SEQ ID NO: 2900 - protein, 109 aa, Synthetic construct
QAVVTQEPSFSVSPGGTVTLTCRSSTGAVTTSNYANWVQQKPGQAFRGLIGGTNKRAPGVPARFSGSLIGDKAALTITGAQADDESIYFCATWYSNLWVFGGGTKLTVL

SEQ ID NO: 2901 - protein, 109 aa, Synthetic construct
QAVVTQEPSFSVSPGGTVTLTCRSSTGAVTTSNYANWVQQKPGQAFRGLIGGTNKRAPGVPARFSGSLIGDKAALTITGAQADDESIYFCAVWYSNLWVFGGGTKLTVL

SEQ ID NO: 2902 - protein, 109 aa, Synthetic construct
QAVVTQEPSFSVSPGGTVTLTCRSSTGAVTTSNYANWVQQKPGQAFRGLIGGTNKRAPGVPARFSGSLIGDKAALTITGAQADDESIYFCAWWYSNLWVFGGGTKLTVL

SEQ ID NO: 2903 - protein, 109 aa, Synthetic construct
QAVVTQEPSFSVSPGGTVTLTCRSSTGAVTTSNYANWVQQKPGQAFRGLIGGTNKRAPGVPARFSGSLIGDKAALTITGAQADDESIYFCAYWYSNLWVFGGGTKLTVL

SEQ ID NO: 2904 - protein, 109 aa, Synthetic construct
QAVVTQEPSFSVSPGGTVTLTCRSSTGAVTTSNYANWVQQKPGQAFRGLIGGTNKRAPGVPARFSGSLIGDKAALTITGAQADDESIYFCALWYSNDWVFGGGTKLTVL

SEQ ID NO: 2905 - protein, 109 aa, Synthetic construct
QAVVTQEPSFSVSPGGTVTLTCRSSTGAVTTSNYANWVQQKPGQAFRGLIGGTNKRAPGVPARFSGSLIGDKAALTITGAQADDESIYFCALWYSNEWVFGGGTKLTVL

SEQ ID NO: 2906 - protein, 109 aa, Synthetic construct
QAVVTQEPSFSVSPGGTVTLTCRSSTGAVTTSNYANWVQQKPGQAFRGLIGGTNKRAPGVPARFSGSLIGDKAALTITGAQADDESIYFCALWYSNFWVFGGGTKLTVL

SEQ ID NO: 2907 - protein, 109 aa, Synthetic construct
QAVVTQEPSFSVSPGGTVTLTCRSSTGAVTTSNYANWVQQKPGQAFRGLIGGTNKRAPGVPARFSGSLIGDKAALTITGAQADDESIYFCALWYSNGWVFGGGTKLTVL

SEQ ID NO: 2908 - protein, 109 aa, Synthetic construct
QAVVTQEPSFSVSPGGTVTLTCRSSTGAVTTSNYANWVQQKPGQAFRGLIGGTNKRAPGVPARFSGSLIGDKAALTITGAQADDESIYFCALWYSNHWVFGGGTKLTVL

SEQ ID NO: 2909 - protein, 109 aa, Synthetic construct
QAVVTQEPSFSVSPGGTVTLTCRSSTGAVTTSNYANWVQQKPGQAFRGLIGGTNKRAPGVPARFSGSLIGDKAALTITGAQADDESIYFCALWYSNKWVFGGGTKLTVL

SEQ ID NO: 2910 - protein, 109 aa, Synthetic construct
QAVVTQEPSFSVSPGGTVTLTCRSSTGAVTTSNYANWVQQKPGQAFRGLIGGTNKRAPGVPARFSGSLIGDKAALTITGAQADDESIYFCALWYSNMWVFGGGTKLTVL

SEQ ID NO: 2911 - protein, 109 aa, Synthetic construct
QAVVTQEPSFSVSPGGTVTLTCRSSTGAVTTSNYANWVQQKPGQAFRGLIGGTNKRAPGVPARFSGSLIGDKAALTITGAQADDESIYFCALWYSNNWVFGGGTKLTVL

SEQ ID NO: 2912 - protein, 109 aa, Synthetic construct
QAVVTQEPSFSVSPGGTVTLTCRSSTGAVTTSNYANWVQQKPGQAFRGLIGGTNKRAPGVPARFSGSLIGDKAALTITGAQADDESIYFCALWYSNPWVFGGGTKLTVL

SEQ ID NO: 2913 - protein, 109 aa, Synthetic construct
QAVVTQEPSFSVSPGGTVTLTCRSSTGAVTTSNYANWVQQKPGQAFRGLIGGTNKRAPGVPARFSGSLIGDKAALTITGAQADDESIYFCALWYSNQWVFGGGTKLTVL

SEQ ID NO: 2914 - protein, 109 aa, Synthetic construct
QAVVTQEPSFSVSPGGTVTLTCRSSTGAVTTSNYANWVQQKPGQAFRGLIGGTNKRAPGVPARFSGSLIGDKAALTITGAQADDESIYFCALWYSNSWVFGGGTKLTVL

SEQ ID NO: 2915 - protein, 109 aa, Synthetic construct
QAVVTQEPSFSVSPGGTVTLTCRSSTGAVTTSNYANWVQQKPGQAFRGLIGGTNKRAPGVPARFSGSLIGDKAALTITGAQADDESIYFCALWYSNTWVFGGGTKLTVL

SEQ ID NO: 2916 - protein, 109 aa, Synthetic construct
QAVVTQEPSFSVSPGGTVTLTCRSSTGAVTTSNYANWVQQKPGQAFRGLIGGTNKRAPGVPARFSGSLIGDKAALTITGAQADDESIYFCALWYSNVWVFGGGTKLTVL

SEQ ID NO: 2917 - protein, 109 aa, Synthetic construct
QAVVTQEPSFSVSPGGTVTLTCRSSTGAVTTSNYANWVQQKPGQAFRGLIGGTNKRAPGVPARFSGSLIGDKAALTITGAQADDESIYFCALWYSNWWVFGGGTKLTVL

SEQ ID NO: 2918 - protein, 109 aa, Synthetic construct
QAVVTQEPSFSVSPGGTVTLTCRSSTGAVTTSNYANWVQQKPGQAFRGLIGGTNKRAPGVPARFSGSLIGDKAALTITGAQADDESIYFCALWYSNYWVFGGGTKLTVL

SEQ ID NO: 2919 - protein, 109 aa, Synthetic construct
QAVVTQESALTTSPGETVTLTCRSSSGAVTTGNFANWVQEKPDHLFTGLIGGTNNRAPGVPARFSGSLIGDKAALTITGAQTEDEAIYFCALWYSNHWVFGGGTKLTVL

SEQ ID NO: 2920 - protein, 109 aa, Synthetic construct
QAVVTQESALTTSPGETVTLTCRSSTGAVTTSNYANWVQEKPDHLFTGLIAGTNNRAPGVPARFSGSLIGDKAALTITGAQPEDEAIFFCALWYSSHWVFGGGTKLTVL

SEQ ID NO: 2921 - protein, 109 aa, Synthetic construct
QAVVTQESALTTSPGETVTLTCRSSTGAVTTSNYANWVQEKPDHLFTGLIAGTNNRAPGVPARFSGSLIGDKAALTITGAQPEDEAMFFCALWFGSHWVFGGGTKLTVL

SEQ ID NO: 2922 - protein, 109 aa, Synthetic construct
QAVVTQESALTTSPGETVTLTCRSSTGAVTTGNYPNWVQEKPDHLFTGLIAGTNNRAPGVPARFSGSLIGDKAALTITGAQTEDEAIYFCALWFSSHWVFGGGTKLTVL

SEQ ID NO: 2923 - protein, 109 aa, Synthetic construct
QAVVTQESALTTSPGETVTLTCRSSTGAVTTSNYANWVQEKPDHLFTGLIGGTNNRGPGVPARFSGSLIGDKAALTITGAQTEDEAVYFCALWYSNHWVFGGGTKLTVL

SEQ ID NO: 2924 - protein, 109 aa, Synthetic construct
QAVVTQEPSLTVSPGGTVTLTCRSSTGAVTTSNYANWVQQKPGQLPKGLISGTNNRGPWTTARFSGSILGDKAVLTLWGAHTEDEAVYYCALWYSNHWVFGGGTKLTVL

SEQ ID NO: 2925 - protein, 109 aa, Synthetic construct
QAVVTQEPSLTVSPGGSVTLTCRSSTGAVTTSNYANWVQQKPGQTPTSLISGTNNRGPWTPARFSGSILGDKAVLTLWGAHAEDEADYFCALWYSNHWVFGGGTKLTVL

SEQ ID NO: 2926 - protein, 109 aa, Synthetic construct
QAVVTQEPSLTVSPGGTVTLTCRSSTGAVTTSNYANWVQEKPGHGFKGLISGTNNRGPWTTARFSGSILGDKAVLTLWGAHAEDEADYFCALWYSNHWVFGGGTKLTVL

SEQ ID NO: 2927 - protein, 109 aa, Synthetic construct
ELVVTQEPSLTVSPGGTVTLTCRSSTGAVTTSNYANWVQQKPGQAPRGLIGGTNKRAPGTPARFSGSLLGGKAALTLSGVQPEDEAEYYCALWYSNLWVFGGGTKLTVL

SEQ ID NO: 2928 - protein, 109 aa, Synthetic construct
QAVVTQESALSTSPGETVTLTCRSSTGAVTTSNYANWVQEKPDHLFTGLIGATNNRAPGVPARFSGSLIGDKAALTITGAQTEDEAIYFCALWYSNHLVFGGGTKLTVL

SEQ ID NO: 2929 - protein, 106 aa, Synthetic construct
QAVVTQESALTTSPGETVTLTCRSSTGAVTTSNYANWVQEKPDHLFTGLIGGTNDRAPGVPARFSGSLIGDKAALTITGAQTEDEAIYFCALWYSNHFHNDMCRWG

SEQ ID NO: 2930 - protein, 109 aa, Synthetic construct
QAVVTQESALTTSPGETVTLTCRSSTGAVTTSNYANWVQEKPDHLFTGLIGGTNNRAPGVPARFSGSLIGDKAALTITGAQTEDEAIYFCVLWYSNHLVFGGGTKLTVL

SEQ ID NO: 2931 - protein, 109 aa, Synthetic construct
QAVVTQESALTTSPGETVTLTCRSSTGAVTTSNYANWVQEKPDHLFTGLIGGTNNRAPGVPARFSGSLIGDKAALTITGAQTEDEAIYFCALWCSNHLVFGGGTKLTVL

SEQ ID NO: 2932 - protein, 109 aa, Synthetic construct
QTVVTQEPSLTVSPGGTVTLTCRSSTGAVTTSNYANWVQQKPGQAPRGLIGGTNKRAPGTPARFSGSLLGGKAALTLLGAQPEDEAEYYCALWYSNLWVFGGGTKLTVL

SEQ ID NO: 2933 - protein, 109 aa, Synthetic construct
QTVVTQEPSLTVSPGGTVTLTCRSSTGAVTTSNYANWVQQKPGQAPRGLIGGTKFLAPGTPARFSGSLLGGKAALTLLGAQPEDEAEYYCALWYSNLWVFGGGTKLTVL

SEQ ID NO: 2934 - protein, 109 aa, Synthetic construct
QTVVTQEPSLTVSPGGTVTLTCRSSTGAVTTSNYANWVQQKPGQAPRGLIGGTKFLAPGTPARFSGSLLGGKAALTLSGVQPEDEAEYYCALWYSNLWVFGGGTKLTVL

SEQ ID NO: 2935 - protein, 109 aa, Synthetic construct
QTVVTQEPSFSVSPGGTVTLTCRSSTGAVTTSNYANWVQQTPGQAPRGLIGGTNKRAPGVPDRFSGSILGNKAALTITGAQADDESDYYCALWYSNLWVFGGGTKLTVL

SEQ ID NO: 2936 - protein, 109 aa, Synthetic construct
QAVVTQEPSLTVSPGGTVTLTCRSSTGAVTTSNYANWVQQKPGQAPRGLIGGTNKRAPGTPARFSGSLIGGKAALTLSGAQPEDEAEYYCALWYSNLWVFGGGTKLTVL

SEQ ID NO: 2937 - protein, 109 aa, Synthetic construct
QAVVTQESALTTSPGETVTLTCRSSTGAVTTSNFANWVQEKPDHLFTSLIGGTNNRAPGVPARFSGSLIGDKAALTITGAQTEDEAIYFCALWYSNHWVFGGGTKLTVL

SEQ ID NO: 2938 - protein, 109 aa, Synthetic construct
QAVVTQEPSLTVSPGGTVTLTCGSSTGAVTTSNFANWVQEKPGQAFRSLIGGTNNRASWVPARFSGSLLGGKAALTISGAQPEDEAEYFCALWYSNHWVFGGGTKLTVL

SEQ ID NO: 2939 - protein, 109 aa, Synthetic construct
QAVVTQEPSLTVSPGGTVTLTCGSSTGAVTTSNFPNWVQQKPGQAPRSLIGGTNNKASWTPARFSGSLLGGKAALTISGAQPEDEAEYYCALWYSNHWVFGGGTKLTVL

SEQ ID NO: 2940 - protein, 107 aa, Synthetic construct
QAVVTQEPSLTVSPGGTVTLTCRSSTGAVTTSNYANWVQQKPGQAPRGLIGGTNKRAPWTPARFSGSLLGGKAALIGAQAEDEADYYCALWYSNLWVFGGGTKLTVL

SEQ ID NO: 2941 - protein, 107 aa, Synthetic construct
  VARIANT 22: note = X can be any amino acid
  VARIANT 90: note = X can be any amino acid
QAVVTQESAFTTSPGGTVILTXRSSTGAVTTNNYANWVQEKPDHLFTGLIGGTSNRAPGVPVRFSGSLIGDKAALTITGAQTEDDGMYFXALWYTTHFVFGGGTKVT

SEQ ID NO: 2942 - protein, 109 aa, Synthetic construct
  VARIANT 22: note = X can be any amino acid
  VARIANT 90: note = X can be any amino acid
QAVVTQESALTTSPGETVTLTXRSSTGAVTTSNYANWVQEKPDHLFTGLIGGTNNRAPGIPARFSGSLIGDKAALTITGAQTEDEAIYFXALWYSNHWVFGGGTKLTVL

SEQ ID NO: 2943 - protein, 109 aa, Synthetic construct
QAVVTQEPSLTVSPGGTVTLTCRSSTGAVTTSNYANWFQQKPGQAPRTLIYGTNKRAPWTPARFSGSLLGGKAALTLSGAQPEDEAEYYCALWYSNLWVFGGGTKLTVL

SEQ ID NO: 2944 - protein, 109 aa, Synthetic construct
QAVVTQEPSLTVSPGGTVTLTCRSSTGAVTTSNYANWFQQKPGQAPRTLIYGTNKRAPWTPARFSGSLLGDKAALTLSGAQPEDEAEYYCALWYSNLWVFGGGTKLTVL

SEQ ID NO: 2945 - protein, 109 aa, Synthetic construct
QAVVTQEPSLTVSPGGTVTLTCRSSTGAVTTSNYANWFQQKPGQAPRTLIGGTNKRAPWTPARFSGSLLGGKAALTLSGAQPEDEAEYYCALWYSNLWVFGGGTKLTVL

SEQ ID NO: 2946 - protein, 109 aa, Synthetic construct
QAVVTQEPSLTVSPGGTVTLTCRSSTGAVTTSNYANWFQQKPGQAPRTLIGGTNKRAPWTPARFSGSLLGDKAALTLSGAQPEDEAEYYCALWYSNLWVFGGGTKLTVL

SEQ ID NO: 2947 - protein, 109 aa, Synthetic construct
QAVVTQEPSLTVSPGGTVTLTCRSSTGAVTTSNYANWFQQKPGQAPRGLIYGTNKRAPWTPARFSGSLLGGKAALTLSGAQPEDEAEYYCALWYSNLWVFGGGTKLTVL

SEQ ID NO: 2948 - protein, 109 aa, Synthetic construct
QAVVTQEPSLTVSPGGTVTLTCRSSTGAVTTSNYANWFQQKPGQAPRGLIYGTNKRAPWTPARFSGSLLGDKAALTLSGAQPEDEAEYYCALWYSNLWVFGGGTKLTVL

SEQ ID NO: 2949 - protein, 109 aa, Synthetic construct
QAVVTQEPSLTVSPGGTVTLTCRSSTGAVTTSNYANWFQQKPGQAPRGLIGGTNKRAPWTPARFSGSLLGGKAALTLSGAQPEDEAEYYCALWYSNLWVFGGGTKLTVL

SEQ ID NO: 2950 - protein, 109 aa, Synthetic construct
QAVVTQEPSLTVSPGGTVTLTCRSSTGAVTTSNYANWFQQKPGQAPRGLIGGTNKRAPWTPARFSGSLLGDKAALTLSGAQPEDEAEYYCALWYSNLWVFGGGTKLTVL

SEQ ID NO: 2951 - protein, 109 aa, Synthetic construct
QAVVTQEPSLTVSPGGTVTLTCRSSTGAVTTSNYANWVQQKPGQAPRTLIYGTNKRAPWTPARFSGSLLGGKAALTLSGAQPEDEAEYYCALWYSNLWVFGGGTKLTVL

SEQ ID NO: 2952 - protein, 109 aa, Synthetic construct
QAVVTQEPSLTVSPGGTVTLTCRSSTGAVTTSNYANWVQQKPGQAPRTLIYGTNKRAPWTPARFSGSLLGDKAALTLSGAQPEDEAEYYCALWYSNLWVFGGGTKLTVL

SEQ ID NO: 2953 - protein, 109 aa, Synthetic construct
QAVVTQEPSLTVSPGGTVTLTCRSSTGAVTTSNYANWVQQKPGQAPRTLIGGTNKRAPWTPARFSGSLLGGKAALTLSGAQPEDEAEYYCALWYSNLWVFGGGTKLTVL

SEQ ID NO: 2954 - protein, 109 aa, Synthetic construct
QAVVTQEPSLTVSPGGTVTLTCRSSTGAVTTSNYANWVQQKPGQAPRTLIGGTNKRAPWTPARFSGSLLGDKAALTLSGAQPEDEAEYYCALWYSNLWVFGGGTKLTVL

SEQ ID NO: 2955 - protein, 109 aa, Synthetic construct
QAVVTQEPSLTVSPGGTVTLTCRSSTGAVTTSNYANWVQQKPGQAPRGLIYGTNKRAPWTPARFSGSLLGGKAALTLSGAQPEDEAEYYCALWYSNLWVFGGGTKLTVL

SEQ ID NO: 2956 - protein, 109 aa, Synthetic construct
QAVVTQEPSLTVSPGGTVTLTCRSSTGAVTTSNYANWVQQKPGQAPRGLIYGTNKRAPWTPARFSGSLLGDKAALTLSGAQPEDEAEYYCALWYSNLWVFGGGTKLTVL

SEQ ID NO: 2957 - protein, 109 aa, Synthetic construct
QAVVTQEPSLTVSPGGTVTLTCRSSTGAVTTSNYANWVQQKPGQAPRGLIGGTNKRAPWTPARFSGSLLGGKAALTLSGAQPEDEAEYYCALWYSNLWVFGGGTKLTVL

SEQ ID NO: 2958 - protein, 109 aa, Synthetic construct
QAVVTQEPSLTVSPGGTVTLTCRSSTGAVTTSNYANWVQQKPGQAPRGLIGGTNKRAPWTPARFSGSLLGDKAALTLSGAQPEDEAEYYCALWYSNLWVFGGGTKLTVL

SEQ ID NO: 2959 - protein, 109 aa, Synthetic construct
QTVVTQEPSFSVSPGGTVTLTCRSSTGAVTTSNYANWVQQTPGQAPRGLIGGTNKRAPGVPDRFSGSLLGDKAALTITGAQADDESDYYCALWYSNLWVFGGGTKLTVL

SEQ ID NO: 2960 - protein, 109 aa, Synthetic construct
QTVVTQEPSLSVSPGGTVTLTCRSSTGAVTTSNYANWVQQTPGQAPRGLIGGTDKRAPGVPDRFSGSLLGDKAALTITGAQAEDESDYYCALWYSNLWVFGGGTKLTVL

SEQ ID NO: 2961 - protein, 109 aa, Synthetic construct
QTVVTQEPSLSVSPGGTVTLTCRSSTGAVTTSNYANWVQQTPGQAPRGLIGGTNKRAPGVPDRFSGSLLGDKAALTITGAQADDEADYYCALWYSNLWVFGGGTKLTVL

SEQ ID NO: 2962 - protein, 109 aa, Synthetic construct
QTVVTQEPSLSVSPGGTVTLTCRSSTGAVTTSNYANWIQQTPGQAPRGLIGGTNKRAPGVPDRLSGSLLGDKAALTITGAQADDEADYYCALWYSNLWVFGGGTKLTVL

SEQ ID NO: 2963 - protein, 109 aa, Synthetic construct
QTVVTQEPSLSVSPGGTVTLTCRSSTGAVTTSNYANWVQQTPGQAPRGLIGGTDKRAPGVPERFSGSLLGDKAALTITGAQAEDESDYYCVLWYSNLWVFGGGTKLTVL

SEQ ID NO: 2964 - protein, 109 aa, Synthetic construct
QTVVTQEPSLSVSPGGTVTLTCRSSTGAVTTSNYANWVQQTPGQAPRGLIGGTDKRAPGVPDRFSGSLLGDKAALTITGAQAEDESDYYCALWYSNHWVFGGGTKLTVL

SEQ ID NO: 2965 - protein, 109 aa, Synthetic construct
QTVVTQEPSFSVSPGGTVTLTCGSSTGAVTTSNYANWVQQTPGQAPRGLIGGTDKRAPGVPDRFSGSLLGDKAALTITGAQADDESDYYCALWYSNLWVFGGGTKLTVL

SEQ ID NO: 2966 - protein, 109 aa, Synthetic construct
QTVVTQEPSLSVSPGGTVTLTCGSSTGAVTTSNYANWVQQTPGQAPRGLIGGTDKRAPGVPDRFSGSLLGDKAALIITGAQADDEADYYCALWYSNHWVFGGGTKLTVL

SEQ ID NO: 2967 - protein, 109 aa, Synthetic construct
QTVVTQEPSLSVSPGGTVTLTCGSSTGAVTTSNYANWVQQTPGQAPRGLIGGTDKRAPGVPDRFSGSLLGDKAALTITGVQADDEADYYCALWYSNHWVFGGGTKLTVL

SEQ ID NO: 2968 - protein, 109 aa, Synthetic construct
QTVVTQEPSLSVSPGGTVTLTCGSSAGAVTTSNYANWVQQTPGQAPRGLIGGTDKRAPGVPDRFSGSLLGDKAALTITGAQADDEADYYCVLWYSNLWVFGGGTKLTVL

SEQ ID NO: 2969 - protein, 109 aa, Synthetic construct
QTVVTQEPSLSVSPGGTVTLTCGSSAGAVTTSNYANWVQQTPGQAPRGLIGGTDKRAPGVPDRFSGSLLGDKAALTITGAQADDEADYYCALWYSNHWVFGGGTKLTVL

SEQ ID NO: 2970 - protein, 109 aa, Synthetic construct
QTVVTQEPSLSVSPGGTVTLTCGSSTGAVTTSNYANWVQQTPGQAPRGLIGGTDKRAPGVPDRFSGSLLGDKAALTITGAQADDEADYYCALWYNNHWVFGGGTKLTVL

SEQ ID NO: 2971 - protein, 109 aa, Synthetic construct
QTVVTQEPSLSVSPGGTVTLTCGSSTGAVTTSNYANWVQQTPGQAPRGLIGGTDKRAPGVPDRFSGSLLGDKAALTITGAQAEDEADYYCVLWYSNLWVFGGGTKLTVL

SEQ ID NO: 2972 - protein, 109 aa, Synthetic construct
QTVVTQEPSLSVSPGGTVTLTCGSSTGAVTTSNYANWVQQTPGQAPRGLIGGTDKRAPGVPDRFSGSLLGDKAALTITGAQAEDEADYYCALWYSNHWVFGGGTKLTVL

SEQ ID NO: 2973 - protein, 109 aa, Synthetic construct
QTVVTQEPSLSVSPGGTVTLTCGSSAGAVTTSNYANWVQQTPGQAPRGLIGGTDKRAPGVPDRFSGSLLGDKAALIITGAQADDEADYYCALWYSNLWVFGGGTKLTVL

SEQ ID NO: 2974 - protein, 109 aa, Synthetic construct
QTVVTQEPSLSVSPGGTVTLTCGSSAGAVTTSNYANWVQQTPGQAPRGLIGGTDKRAPGVPDRFSGSLLGDKAALTITGAQADDEADYYCALWYNNLWVFGGGTKLTVL

SEQ ID NO: 2975 - protein, 109 aa, Synthetic construct
QTVVTQEPSLSVSPGGTVTLTCGSSTGAVTTSNYANWVQQTPGQAPRGLIGGTDKRAPGVPDRFSGSLLGDKAALTITGAQAEDEADYYCALWYSDLWVFGGGTKLTVL

SEQ ID NO: 2976 - protein, 109 aa, Synthetic construct
QTVVTQEPSLSVSPGGTVTLTCGSSTGAVTTSNYANWVQQTPGQAPRGLIGGTDKRAPGVPDRFSGSLLGDKAALTITGAQAEDEADYYCALWYSNHWVFGCGTKLTVL

SEQ ID NO: 2977 - protein, 109 aa, Synthetic construct
QTVVTQEPSLSVSPGGTVTLTCGSSTGAVTTSNYANWVQQTPGQAPRGLIGGTDKRAPGVPDLFSGSLLGDKAALTITGAQAEDEADYYCALWYSNHWVFGCGTKLTVL

SEQ ID NO: 2978 - protein, 109 aa, Synthetic construct
QTVVTQEPSLSVSPGGTVTLTCGSSTGAVTTSNYANWVQQTPGQAPRGLIGGTDKRAPGVLDLFSGSLLGDKAALTITGAQAEDEADYYCALWYSNHWVFGCGTKLTVL

SEQ ID NO: 2979 - protein, 109 aa, Synthetic construct
QTVVTQEPSLSVSPGGTVTLTCGSSTGAVTTSNYANWVQQTPGQAPRGLIGGTDKRAPGVPDRFSGSLLGDKAALTITGAQAEDEADYYCALWYSNLWVFGGGTKLTVL

SEQ ID NO: 2980 - protein, 109 aa, Synthetic construct
QTVVTQEPSLSVSPGGTVTLTCGSSTGAVTTSNYANWVQQTPGQAPRGLIGGTDKRAPGVPDRFSGSLLGDKAALIITGAQADDEADYYCALWYSNLWVFGGGTKLTVL

SEQ ID NO: 2981 - protein, 109 aa, Synthetic construct
QTVVTQEPSLSVSPGGTVTLTCGSSTGAVTTSNYANWVQQTPGQAPRGLIGGTDKRAPGVPDRFSGSLLGDKAALIITGAQAEDEADYYCALWYSNLWVFGGGTKLTVL

SEQ ID NO: 2982 - protein, 109 aa, Synthetic construct
QTVVTQEPSLSVSPGGTVTLTCGSSTGAVTTSNYANWVQQTPGQAPRGLIGGTDKRAPGVPDRFSGSLLGDKAALIITGAQADDEADYYCVLWYSNLWVFGGGTKLTVL

SEQ ID NO: 2983 - protein, 109 aa, Synthetic construct
QTVVTQEPSLSVSPGGTVTLTCGSSTGAVTTSNYANWVQQTPGQAPRGLIGGTDKRAPGVPDRFSGSLLGDKAALTITGVQADDEADYYCALWYSNLWVFGGGTKLTVL

SEQ ID NO: 2984 - protein, 109 aa, Synthetic construct
QTVVTQEPSLSVSPGGTVTLTCGSSAGAVTTSNYANWVQQTPGQAPRGLIGGTDKRAPGVPDRFSGSLLGDKAALTITGVQADDEADYYCALWYSNLWVFGGGTKLTVL

SEQ ID NO: 2985 - protein, 109 aa, Synthetic construct
QTVVTQEPSLSVSPGGTVTLTCGSSTGAVTTSNYANWVQQTPGQAPRGLIGGTDKRAPGVPDRFSGSLLGDKAALTITGVQAEDEADYYCALWYSNLWVFGGGTKLTVL

SEQ ID NO: 2986 - protein, 109 aa, Synthetic construct
QTVVTQEPSLSVSPGGTVTLTCGSSTGAVTTSNYANWVQQTPGQAPRGLIGGTDKRAPGVPDRFSGSLLGDKAALTITGVQADDEADYYCALWYNNLWVFGGGTKLTVL

SEQ ID NO: 2987 - protein, 109 aa, Synthetic construct
QTVVTQEPSLSVSPGGTVTLTCGSSTGAVTTSNYANWVQQTPGQAPRGLIGGTDKRAPGVPDRFSGSLLGDKAALTITGVQADDEADYYCVLWYSNLWVFGGGTKLTVL

SEQ ID NO: 2988 - protein, 109 aa, Synthetic construct
QTVVTQEPSLSVSPGGTVTLTCGSSAGAVTTSNYANWVQQTPGQAPRGLIGGTDKRAPGVPDRFSGSLLGDKAALTITGAQADDEADYYCALWYSNLWVFGGGTKLTVL

SEQ ID NO: 2989 - protein, 109 aa, Synthetic construct
QTVVTQEPSLSVSPGGTVTLTCGSSTGAVTTSNYANWVQQTPGQAPRGLIGGTDKRAPGVPDRFSGSLLGDKAALTITGAQADDEADYYCALWYNNLWVFGGGTKLTVL

SEQ ID NO: 2990 - protein, 109 aa, Synthetic construct
QTVVTQEPSLSVSPGGTVTLTCGSSTGAVTTSNYANWVQQTPGQAPRGLIGGTDKRAPGVPDRFSGSLLGDKAALTITGAQADDEADYYCVLWYSNLWVFGGGTKLTVL

SEQ ID NO: 2991 - protein, 109 aa, Synthetic construct
QTVVTQEPSLSVSPGGTVTLTCGSSTGAVTTSNYANWVQQTPGQAPRGLIGGTDKRAPGVPDRFSGSLLGDKAALTITGAQADDEADYYCALWYSNHWVFGGGTKLTVL

SEQ ID NO: 2992 - protein, 109 aa, Synthetic construct
QTVVTQEPSLSVSPGGTVTLTCGSSTGAVTTSNYANWVQQTPGQAPRGLIGGTDKRAPGVPDRFSGSLLGDKAALIITGVQADDEADYYCALWYSNLWVFGGGTKLTVL

SEQ ID NO: 2993 - protein, 109 aa, Synthetic construct
QTVVTQEPSLSVSPGGTVTLTCGSSTGAVTTSNYANWVQQTPGQAPRGLIGGTDKRAPGVPDRFSGSLLGDKAALIITGAQADDEADYYCALWYNNLWVFGGGTKLTVL

SEQ ID NO: 2994 - protein, 109 aa, Synthetic construct
QTVVTQEPSLSVSPGGTVTLTCGSSTGAVTTSNYANWVQQTPGQAPRGLIGGTDKRAPGVPDRFSGSLLGDKAALTITGAQADDEADYYCVLWYNNLWVFGGGTKLTVL

SEQ ID NO: 2995 - protein, 109 aa, Synthetic construct
RHVVTQEPSLSVSPGGTVTLTCGSSTGAVTTSNYANWVQQTPGQAPRGLIGGPDKRAPGVPDRFSGSLLGDKAALIITGVQADDEADYYCALWYSNLWVFGGGTKLTVL

SEQ ID NO: 2996 - protein, 109 aa, Synthetic construct
RTVVTQEPSLSVSPGGTVTLTCGSSTGAVTTSNYANWVQQTPGQAPRGLIGGTDKRAPGVPDRFSGSLLGDKAALTITGAQADDEADYYCVLWYNNLWVFGGGTKLTVL

SEQ ID NO: 2997 - protein, 109 aa, Synthetic construct
QTVVTQEPSLSVSPGGTVTLTCGSSTGAVTTSNYANWVQQTPGQAPRGLIGGTDKRAPGVPDRFSGSLLGDKAALTITGAQAEDEADYYCALWYNNLWVFGGGTKLTVL

SEQ ID NO: 2998 - protein, 109 aa, Synthetic construct
QTVVTQEPSLSVSPGGTVTLTCGSSTGAVTTSNYANWVQQTPGQAPRGLIGGTDKRAPGVPDRFSGSLLGDKAALTITGAQADDEADYYCVLWYSNHWVFGGGTKLTVL

SEQ ID NO: 2999 - protein, 109 aa, Synthetic construct
QTVVTQEPSLSVSPGGTVTLTCGSSAGAVTTSNYANWVQQTPGQAPRGLIGGTDKRAPGVPDRFSGSLLGDKAALTITGAQAEDEADYYCALWYSNLWVFGGGTKLTVL

SEQ ID NO: 3000 - protein, 109 aa, Synthetic construct
QTVVTQEPSFSVSPGGTVTLTCRSSTGAVTTSNYANWYQQTPGQAPRTLIYGTNKRAPGVPDRFSGSILGNKAALTITGAQADDESDYYCALWYSNLWVFGGGTKLTVL

SEQ ID NO: 3001 - protein, 109 aa, Synthetic construct
QTVVTQEPSFSVSPGGTVTLTCRSSTGAVTTSNYANWYQQTPGQAPRTLIGGTNKRAPGVPDRFSGSILGNKAALTITGAQADDESDYYCALWYSNLWVFGGGTKLTVL

SEQ ID NO: 3002 - protein, 109 aa, Synthetic construct
QAVVTQEPSLTVSPGGTVTLTCRSSTGAVTTSNYANWVQQKPGQAPRGLIGGTNKRAPGVPARFSGSLLGDKAALTLSGAQPEDEAEYYCALWYSNLWVFGGGTKLTVL

SEQ ID NO: 3003 - protein, 109 aa, Synthetic construct
QTVVTQEPSFSVSPGGTVTLTCRSSTGAVTTSNYANWVQQTPGQAPRGLIGGTNKRAPGVPDRFSGSLLGDKAALTITGAQADDESDYYCALWYSNRWVFGGGTKLTVL

SEQ ID NO: 3004 - protein, 109 aa, Synthetic construct
QTVVTQEPSFSVSPGGTVTLTCGSSTGAVTTSNYANWVQQTPGQAPRGLIGGTNKRAPGVPDRFSGSLLGDKAALTITGAQADDESDYYCALWYSNRWVFGGGTKLTVL

SEQ ID NO: 3005 - protein, 109 aa, Synthetic construct
QTVVTQEPSFSVSPGGTVTLTCRSSAGAVTTSNYANWVQQTPGQAPRGLIGGTNKRAPGVPDRFSGSLLGDKAALTITGAQADDESDYYCALWYSNRWVFGGGTKLTVL

SEQ ID NO: 3006 - protein, 109 aa, Synthetic construct
QTVVTQEPSLSVSPGGTVTLTCRSSTGAVTTSNYANWVQQTPGQAPRGLIGGTNKRAPGVPDRFSGSLLGDKAALTITGAQADDESDYYCALWYSNRWVFGGGTKLTVL

SEQ ID NO: 3007 - protein, 109 aa, Synthetic construct
QTVVTQEPSFSVSPGGTVTLTCRSSTGAVTTSNYANWVQQTPGQAPRGLIGGTNKRAPGVPDRFSGSLLGDRAALTITGAQADDESDYYCALWYSNRWVFGGGTKLTVL

SEQ ID NO: 3008 - protein, 109 aa, Synthetic construct
QAVVTQEPSFSVSPGGTVTLTCRSSTGAVTTSNYANWVQQTPGQAPRGLIGGTNKRAPGVPDRFSGSLLGDKAALTITGAQADDESDYYCALWYSNRWVFGGGTKLTVL

SEQ ID NO: 3009 - protein, 109 aa, Synthetic construct
QAVVTQEPSFSVSPGGTVTLTCRSSIGAVTTSNYANWVQQTPGQAPRGLIGGTNKRAPGVPDRFSGSLLGDKAALTITGAQADDESDYYCALWYSNRWVFGGGTKLTVL

SEQ ID NO: 3010 - protein, 109 aa, Synthetic construct
QTVVTQEPSFSVSPGGTVTLTCRSSTGAVTTGNYANWVQQTPGQAPRGLIGGTNKRAPGVPDRFSGSLLGDKAALTITGAQADDESDYYCALWYSNRWVFGGGTKLTVL

SEQ ID NO: 3011 - protein, 109 aa, Synthetic construct
QTVVTQEPSFSVSPGGTVTLTCRSSTGAVTTSNYANWVQQAPGQTPRGLIGGTNKRAPGVPDRFSGSLLGDKAALTITGAQADDESDYYCALWYSNRWVFGGGTKLTVL

SEQ ID NO: 3012 - protein, 109 aa, Synthetic construct
QTVVTQEPSFSVSPGGTVTLTCRSSTGAVTTSNYANWVQQTPGQAPRGLIGGTSKRAPGVPDRFSGSLLGDKAALTITGAQADDESDYYCALWYSNRWVFGGGTKLTVL

SEQ ID NO: 3013 - protein, 109 aa, Synthetic construct
QTVVTQEPSFSVSPGGTVTLTCGSSTGAVTTSNYANWVQQTPGQAPRGLIGGTNRRAPGVPDRFSGSLLGDKAALTITGAQADDESDYYCALWYSNLWVFGGGTKLTVL

SEQ ID NO: 3014 - protein, 109 aa, Synthetic construct
QTVVTQEPSFSVSPGGTVTLTCRSSTGAVTTSNYANWVRQTPGQAPRGLIGGTNKRAPGVPDRFSGSLLGDKAALTITGAQADDESDYYCALWYSNRWVFGGGTKLTVL

SEQ ID NO: 3015 - protein, 109 aa, Synthetic construct
QTVVTQEPSFSVSPGGTVTLTCRSSTGAVTTSNYANWVQQTPGQAPRGLIGGTNKRAPGVPDRFSGSLLGDKAALIITGAQADDESDYYCALWYSNRWVFGGGTKLTVL

SEQ ID NO: 3016 - protein, 109 aa, Synthetic construct
QTVVTQEPSFSVSPGGTVTLTCRSSTGAVTTSNYANWVQQTPGQAPRGLIGGTNRRAPGVPDRFSGSLLGDKAALTITGAQADDESDYYCALWYNNLWVFGGGTKLTVL

SEQ ID NO: 3017 - protein, 109 aa, Synthetic construct
QTVVTQEPSFSVSPGGTVTLTCKSSTGAVTTSNYANWVQQTPGQAPRGLIGGTNKRAPGVPDRFSGSLLGDKAALTITGAQADDESDYYCALWYSNRWVFGGGTKLTVL

SEQ ID NO: 3018 - protein, 109 aa, Synthetic construct
QTVVTQEPSFSVSPGGTVTLTCRSSTGAVTTSNYANWVQQTPGQAPRGLIGGTNKRAPGVPDRFSGSLLGDKAALTITGAQADDESDYYCALWYSNHWVFGGGTKLTVL

SEQ ID NO: 3019 - protein, 109 aa, Synthetic construct
QTVVTQEPSFSVSPGGTVTLTCRSSTGAVTTSNYANWVQQTPGQAPRGLIGGTNRRAPGVPDRFSGSLLGDKAALTITGAQADDESDYYCALWYSNRWVFGGGTKLTVL

SEQ ID NO: 3020 - protein, 109 aa, Synthetic construct
QTVVTQEPSLSVSPGGTVTLTCRSSTGAVTTSNYANWVQQTPGQAPRGLIGGTNKRAPGVPDRFSGSLLGDKAALTITGAQADDESDYYCALWYNNLWVFGGGTKLTVL

SEQ ID NO: 3021 - protein, 109 aa, Synthetic construct
QTVVTQEPSLSVSPGGTVTLTCRSSTGAVTTSNYANWVQQTPGQAPRGLIGGTNKRAPGVPDRFSGSLLGDKAALTITGAQADDESDYYCALWYSNLWVFGGGTKLTVL

SEQ ID NO: 3022 - protein, 109 aa, Synthetic construct
QTVVTQEPSLSVSPGGTVTLTCGSSTGAVTTSNYANWVQQTPGQAPRGLIGGTNKRAPGVPDRFSGSLLGDKAALTITGAQADDESDYYCALWYSNLWVFGGGTKLTVL

SEQ ID NO: 3023 - protein, 109 aa, Synthetic construct
QTVVTQEPSLSVSPGGTVTLTCRSSTGAVTTSNYANWVQQTPGQAPRGLIGGTNKRAPGVPDRFSGSLLGDKAALIITGAQADDEADYYCALWYSNLWVFGGGTKLTVL

SEQ ID NO: 3024 - protein, 109 aa, Synthetic construct
RTVVTQEPSLSVSPGGTVTLTCRSSTGAVTTSNYANWVQQTPGQAPRGLIGGTNKRAPGVPDRFSGSLLGDKAALTITGAQADDESDYYCALWYNNLWVFGGGTKLTVL

SEQ ID NO: 3025 - protein, 109 aa, Synthetic construct
QTVVTQEPSFSVSPGGTVTLTCRSSTGAVTTSNYANWVQQTPGQAPRGLIGGTNKRAPGVPDRFSGSLLGDKAALTITGAQADDESDYYCALWYNNLWVFGGGTKLTVL

SEQ ID NO: 3026 - protein, 109 aa, Synthetic construct
QTVVTQEPSFSVSPGGTVTLTCGSSTGAVTTSNYANWVQQTPGQAPRGLIGGTDKRAPGVPDRFSGSLLGGKAALTITGAQADDESDYYCALWYSNLWVFGGGTKLTVL

SEQ ID NO: 3027 - protein, 109 aa, Synthetic construct
QPVVTQEPSFSVSPGGTVTLTCRSSTGAVTTSNYANWVQQTPGQAPRGLIGGTNKRAPGVPDRFSGSLLGDKAALTITGAQADDESDYYCALWYSNLWVFGGGTKLTVL

SEQ ID NO: 3028 - protein, 109 aa, Synthetic construct
QTVVTQEPSFSVSPGGTVTLTCGSSTGAVTTSNYANWVQQTPGQAPRGLIGGTNKRAPGVPDRFSGSLLGDKAALTITGAQADDESDYYCALWYSNLWVFGGGTKLTVL

SEQ ID NO: 3029 - protein, 109 aa, Synthetic construct
RTVVTQEPSFSVSPGGTVTLTCGSSTGAVTTSNYANWVQQTPGQAPRGLIGGTNKRAPGVPDRFSGSLLGDKAALIITGAQADDESDYYCALWYSNLWVFGGGTKLTVL

SEQ ID NO: 3030 - protein, 109 aa, Synthetic construct
QTVVTQEPSLAVSPGGTVTLTCRSSTGAVTTSNYANWVQQTPGQAPRGLIGGTDQRAPGVPDRFSGSLLGDKATLTITGAQADDESDYYCALWYSNLWVFGGGTKLTVL

SEQ ID NO: 3031 - protein, 109 aa, Synthetic construct
QAVVTQEQSFSVSPGGTVTLTCRSSIGAVTTSNYANWVQQTPGQAPRGLIGGTNKRAPGVPDRFSGSLLGDKAALTITGAQADDESDYYCALWYSNRWVFGGGTKLTVL

SEQ ID NO: 3032 - protein, 109 aa, Synthetic construct
QTVVTQEPSLSVSPGGTVTLTCGPSTGAVTTSNYANWVQQTPGQAPRGLIGGTNKRAPGVPDRFSGSLLGDKAALTITGAQADDESDYYCALWYSNLWVFGGGTKLTVL

SEQ ID NO: 3033 - protein, 109 aa, Synthetic construct
QTVVTQEPSFSVSPGGTVTLTCRSSTGAVTTSNYANWVQQAPGQAPRGLIGGTNQRAPGVPDRFSGSLLGDKAALTITGAQADDEADYYCALWYSNLWVFGGGTKLTVL

SEQ ID NO: 3034 - protein, 109 aa, Synthetic construct
QTVVTQEPSFSVSPGGTVTLTCRSSTGAVTTSNYANWVQQTPGQAPRGLIGGTNKRAPGVPDRFSGSLLGDKAALTITGVQADDESDYYCALWYSNRWVFGGGTKLTVL

SEQ ID NO: 3035 - protein, 109 aa, Synthetic construct
QTVVTQEPSFSVSPGGTVTLTCRSSTGAVTTSNYANWVQQTPGQAPRGLIGGTDKRAPGVPDRFSGSLLGDKAALTITGVQADDESDYYCALWYSNLWVFGGGTKLTVL

SEQ ID NO: 3036 - protein, 109 aa, Synthetic construct
QTVVTQEPSFSVSPGGTVTLTCRSSTGAVTTSNYANWVQQTPGQAPRGLIGGTNKRAPGVPDRFSGSLLGDKAVLTITGAQADDESDYYCALWYSNLWVFGGGTKLTVL

SEQ ID NO: 3037 - protein, 109 aa, Synthetic construct
QTVVTQEPSFSVSPGGTVTLTCRSSTGAVTTSNYANWVQQTPGQAPRGLIGGTNKRAPGVPDRFSGSLLGDKAALTITGAQADDEADYYCALWYSNLWVFGGGTKLTVL

SEQ ID NO: 3038 - protein, 109 aa, Synthetic construct
QTVVTQETSLSVSPGGTVTLTCRSSTGAVTTSNYANWVQQTPGQAPRGLIGGTDKRAPGVPDRFSGSLLGDKAALTITGAQAEDESDYYCALWYSNLWVFGGGTKLTVL

SEQ ID NO: 3039 - protein, 109 aa, Synthetic construct
QTVVTQEPSFSVSPGGTVTLTCGSSAGAVTTSNYANWVQQTPGQAPRGLIGGTNKRAPGVPDRFSGSLLGDKAALTITGAQADDESDYYCALWYSNLWVFGGGTKLTVL

SEQ ID NO: 3040 - protein, 109 aa, Synthetic construct
QPVVTQEPSFSVSPGGTVTLTCRSSTGAVTASNYANWVQQAPGQAPRGLIGGTNQRAPGVPDRFSGSLLGDKAALTITGAQADDESDYYCALWYNNLWVFGGGTKLTVL

SEQ ID NO: 3041 - protein, 109 aa, Synthetic construct
QTVVTQEPSLSVSPGGTVTLTCRSSTGAVTTSNYANWVQQTPGQAPRGLIGGTNKRAPGVPDRFSGSLLGDKAALTITGAQADDEADYYCALWYNNLWVFGGGTKLTVL

SEQ ID NO: 3042 - protein, 109 aa, Synthetic construct
QAVVTQESALTTSPGETVTLTCRSSTGAVTTSNYANWVQEKPDHLFTGLIGGTNNRAPGVPARFSGSLIGDKAALTITGAQTEDEAIYFCSLWYGSHWVFGGGTKLTVL

SEQ ID NO: 3043 - protein, 109 aa, Synthetic construct
QAVVTQESALTTSPGETVTLTCRSSAGAVTTSNYANWVQEKPDHLFTGLIGGTNNRAPGVPARFSGSLIGDKAALTITGAQTEDEAIYFCALWNSNHWVFGGGTKLTVL

SEQ ID NO: 3044 - protein, 108 aa, Synthetic construct
QAVVTQEPATTTSPGETVTLTCRSSTGAVTTGNYVNWVQEKPDHLFSGLIGNTNNRAPGVPARFSGSLIGDKAALTITGTQTEDEAIYFCALWYTDHLVFGGGTKLTV

SEQ ID NO: 3045 - protein, 109 aa, Synthetic construct
QAVVTQEPSLTVSPGGTVTLTCRSSTGAVTTSNYANWFQQKPGQAPRALIYGTNKRAPWTPARFSGSLLGGKAALTLSGVQPEDEAEYYCALWYSNLWVFGGGTKLTVL

SEQ ID NO: 3046 - protein, 109 aa, Synthetic construct
QTVVTQEPSLTVSPGGTVTLTCRSSTGAVTTSNYANWVQQKPGQAPRGLIGGTNKRAPGVPARFSGSLLGGKAALTLSGVQPEDEAEYYCALWYSNLWVFGGGTKVEIK

SEQ ID NO: 3047 - protein, 109 aa, Synthetic construct
QTVVTQEPSLTVSPGGTVTLTCRSSTGAVTTSNYANWFQQKPGQAPRGLIGGTNKRAPGVPARFSGSLLGGKAALTLSGVQPEDEAEYYCALWYSNLWVFGGGTKVEIK

SEQ ID NO: 3048 - protein, 109 aa, Synthetic construct
QTVVTQEPSLTVSPGGTVTLTCRSSTGAVTTSNYANWVQQKPGQAPRALIGGTNKRAPGVPARFSGSLLGGKAALTLSGVQPEDEAEYYCALWYSNLWVFGGGTKVEIK

SEQ ID NO: 3049 - protein, 107 aa, Synthetic construct
QAVVTQESAFTTSPGGTVILTCRSSTGAVTTNNYANWVQEKPDHLFTGLIGGTSNRAPGVPVRFSGSLIGDKAALTITGAQTEDDGMYFCALWYTTHFVFGGGTKVT

SEQ ID NO: 3050 - protein, 109 aa, Synthetic construct
QAVVTQESALTTSPGETVTLTCRSSTGAVTTSNYANWVQEKPDHLFTGLIGGTNNRAPGVPARFSGSLIGDKAALTITGAQTEDEAIYFCALWYSNHLVFGGGTKLTVL

SEQ ID NO: 3051 - protein, 109 aa, Synthetic construct
QAVVTQEPSLTVSPGGTVTLTCRSSTGAVTTSNYANWVQQKPGQAPRGLIGGTNNRAPWTPARFSGSLLGGKAALTLSGVQPEDEAEYYCALWYSNHLVFGGGTKLTVL

SEQ ID NO: 3052 - protein, 109 aa, Synthetic construct
QTVVTQEPSFSVSPGGTVTLTCRSSTGAVTTSNYANWYQQTPGQAPRTLIGGTNNRAPGVPDRFSGSILGNKAALTITGAQADDESDYYCALWYSNHWVFGGGTKLTVL

SEQ ID NO: 3053 - protein, 109 aa, Synthetic construct
DAVVTQESALTSSPGETVTLTCRSSTGAVTISNVASWVQEKPDHLFTGLIGGTNNRAPGVPARFSGSLIGDKAALTITGAQTEDEAIYFCVLWYSDHWVFGGGTKLTVL

SEQ ID NO: 3054 - protein, 109 aa, Synthetic construct
QAVVTQESALTTSPGETVTLTCRSSTGAVITSNYANWVQEKPDHLFTGLIGRTYNRVPGVPARFSGSLIGDKAALTITGAQTEDEAIYFCALWYSNHFVFGGGTKLTVL

SEQ ID NO: 3055 - protein, 109 aa, Synthetic construct
QAVVTQEPSLTVSPGGTVTLTCGSSTGAVITSNYANWFQQKPGQAPRTLIGRTYNKVPWTPARFSGSLLGGKAALTLSGAQPEDEAEYYCALWYSNHFVFGGGTKLTVL

SEQ ID NO: 3056 - protein, 109 aa, Synthetic construct
QAVVTQEPSLTVSPGGTVTLTCGSSTGAVITSNYANWVQQKPGQAPTGLIGRTYNKVPWTPARFSGSLLGDKAALTLSGAQPEDEAEYFCALWYSNHFVFGGGTKLTVL

SEQ ID NO: 3057 - protein, 109 aa, Synthetic construct
QAVVTQESALTTSPGETVTLTCRSSTGAVTTSNYANWVQEKPDHLFTGLIGGTNKRAPGVPARFSGSLIGDKAALTITGAQTEDEAIYFCALWYSNHWVFGCGTKLTVL

SEQ ID NO: 3058 - protein, 109 aa, Synthetic construct
QAVVTQEPSLTVSPGGTVTLTCRSSTGAVTTSNYANWVQQKPGQAPRGLIGGTNKRAPWTPARFSGSLLGGKAALTITGAQAEDEADYYCAEWYSNLWVFGGGTKLTVL

SEQ ID NO: 3059 - protein, 109 aa, Synthetic construct
QAVVTQEPSLTVSPGGTVTLTCRSSTGAVTTSNYANWVQQKPGQAPRGLIGGTNKRAPWTPARFSGSLLGGKAALTITGAQAEDEADYYCAQWYSNLWVFGGGTKLTVL

SEQ ID NO: 3060 - protein, 109 aa, Synthetic construct
QAVVTQEPSLTVSPGGTVTLTCRSSTGAVTTSNYANWVQQKPGQAPRGLIGDTNKRAPWTPARFSGSLLGGKAALTITGAQAEDEADYYCALWYSNLWVFGGGTKLTVL

SEQ ID NO: 3061 - protein, 109 aa, Synthetic construct
QAVVTQEPSLTVSPGGTVTLTCRSSTGAVTTSNYANWVQQKPGQAPRGLIGGTNGRAPWTPARFSGSLLGGKAALTITGAQAEDEADYYCALWYSNLWVFGGGTKLTVL

SEQ ID NO: 3062 - protein, 109 aa, Synthetic construct
  VARIANT 52: note = X can be any amino acid
  VARIANT 55: note = X can be any amino acid
  VARIANT 92: note = X can be any amino acid
QAVVTQEPSLTVSPGGTVTLTCRSSTGAVTTSNYANWVQQKPGQAPRGLIGXTNXRAPWTPARFSGSLLGGKAALTITGAQAEDEADYYCAXWYSNLWVFGGGTKLTVL

SEQ ID NO: 3063 - protein, 109 aa, Synthetic construct
QAVVTQEPSLTVSPGGTVTLTCRSSTGAVTASNYANWVQQKPGQAPRGLIGGTNKRAPWTPARFSGSLLGGKAALTITGAQAEDEADYYCALWYSNLWVFGGGTKLTVL

SEQ ID NO: 3064 - protein, 109 aa, Synthetic construct
QAVVTQEPSLTVSPGGTVTLTCRSSTGAVTTSNYANWVQQKPGQAPRGLIGGTNKRAPWTPARFSGSLLGGKAALTITGAQAEDEADYYCALWYSNLAVFGGGTKLTVL

SEQ ID NO: 3065 - protein, 109 aa, Synthetic construct
DIQMTQEPSLTTSPGGTVTLTCRSSTGAVTTSNYANWVQEKPGQAPRGLIGGTNKRAPGTPARFSGSLIGGKAALTITGVQPEDEAIYFCALWYSNLWVFGGGTKLEIK

SEQ ID NO: 3066 - protein, 109 aa, Synthetic construct
QAVVTQEPSLTVSPGGTVTLTCGSSTGAVTTSNYANWVQEKPGQAPRGLIGGTNKRAPWTPARFSGSLLGGKAALTITGAQAEDEADYYCALWYSNLWVFGGGTKLTVL

SEQ ID NO: 3067 - protein, 106 aa, Synthetic construct
DIQMTQEPSLTTSPGGTVTLTCRSSTGAVTTSNYANWVQEKPGQAPRGLIGGTNKRAPGTPARFSGSLIGGKAALTITGVQPEDEAIYFCALWYSNLWVFGGGTKL

SEQ ID NO: 3068 - protein, 109 aa, Synthetic construct
QAVVTQESALTTSPGETVTLTCRSSTGAVTISNYANWVQEKPDHLFTGLIGGINNRAPGVPARFSGSLIGDKAALTITGAQTEDEAIYFCALWYNNQFIFGSGTKVTVL

SEQ ID NO: 3069 - protein, 110 aa, Synthetic construct
DQAVLTQESALTTSPGETVTLTCRSSTGAVTTSNYANWVQEKPDHLFTGLIGGTNNRVPGVPARFSGSLIGDKAALTITGAQTEDEAIYFCVLWHSNHWVFGGGTKLTVL

SEQ ID NO: 3070 - protein, 110 aa, Synthetic construct
EAVVTQSPATLSVSPGERATLSCRSSTGAVTTSNYANWVQEKPGQAFRGLIGGANKRAPGVPARFSGSLSGDEATLTISSLQSEDFAVYFCQLWYSNLWVFGQGTKLEIK

SEQ ID NO: 3071 - protein, 110 aa, Synthetic construct
EAVVTQSPATLSVSPGERATLSCRSSTGAVTTSNYANWVQEKPGQAFRGLIGGANKRAPGVPARFSGSLSGDEATLTISSLQSEDFAVYFCALWYSNLWVFGQGTKLEIK

SEQ ID NO: 3072 - protein, 109 aa, Synthetic construct
EAVVTQSATLSVSPGERATLSCRSSTGAVTTSNYANWVQEKPGQAFRGLIGGANKRAPGVPARFSGSLSGDEATLTISSLQSEDFAVYFCQLWYSNLWVFGQGTKLEIK

SEQ ID NO: 3073 - protein, 109 aa, Synthetic construct
EAVVTQSATLSVSPGERATLSCRSSTGAVTTSNYANWVQEKPGQAFRGLIGGANKRAPGVPARFSGSLSGDEATLTISSLQSEDFAVYFCALWYSNLWVFGQGTKLEIK

SEQ ID NO: 3074 - protein, 110 aa, Synthetic construct
EIVVTQSPATLSVSPGERATLSCRSSTGAVTTSNYANWVQEKPGQAFRGLIGGANKRAPGVPARFSGSLSGDEATLTISSLQSEDFAVYFCALWYSNLWVFGQGTKLEIK

SEQ ID NO: 3075 - protein, 110 aa, Synthetic construct
EAVVTQSPATLSVSPGERATLSCRSSTGAVTTSNYANWVQEKPGQAPRGLIGGANKRAPGVPARFSGSLSGDEATLTISSLQSEDFAVYFCALWYSNLWVFGQGTKLEIK

SEQ ID NO: 3076 - protein, 110 aa, Synthetic construct
EAVVTQSPATLSVSPGERATLSCRSSTGAVTTSNYANWVQEKPGQAFRGLIGGANKRAPGVPARFSGSGSGDEATLTISSLQSEDFAVYFCALWYSNLWVFGQGTKLEIK

SEQ ID NO: 3077 - protein, 110 aa, Synthetic construct
EAVVTQSPATLSVSPGERATLSCRSSTGAVTTSNYANWVQEKPGQAFRGLIGGANKRAPGVPARFSGSLSGDEATLTISSLQSEDFAVYYCALWYSNLWVFGQGTKLEIK

SEQ ID NO: 3078 - protein, 110 aa, Synthetic construct
EAVVTQSPATLSVSPGERATLSCRSSTGAVTTSNYANWVQEKPGQAFRGLIGGANKRAPGVPARFSGSLSGTEATLTISSLQSEDFAVYFCALWYSNLWVFGQGTKLEIK

SEQ ID NO: 3079 - protein, 110 aa, Synthetic construct
EAVVTQSPATLSVSPGERATLSCRASTGAVTTSNYANWVQEKPGQAFRGLIGGANKRAPGVPARFSGSLSGDEATLTISSLQSEDFAVYFCALWYSNLWVFGQGTKLEIK

SEQ ID NO: 3080 - protein, 110 aa, Synthetic construct
EAVVTQSPATLSVSPGERATLSCRSSTGAVTTSNYANWVQEKPGQAFRLLIGGANKRAPGVPARFSGSLSGDEATLTISSLQSEDFAVYFCALWYSNLWVFGQGTKLEIK

SEQ ID NO: 3081 - protein, 110 aa, Synthetic construct
EAVVTQSPATLSVSPGERATLSCRSSTGAVTTSNYANWVQQKPGQAFRGLIGGANKRAPGVPARFSGSLSGDEATLTISSLQSEDFAVYFCALWYSNLWVFGQGTKLEIK

SEQ ID NO: 3082 - protein, 110 aa, Synthetic construct
EIVVTQSPATLSVSPGERATLSCRSSTGAVTTSNYANWVQEKPGQAFRGLIGGANKRAPGVPARFSGSLSGDEATLTISSLQSEDFAVYFCALWYSNLWVFGGGTKLEIK

SEQ ID NO: 3083 - protein, 109 aa, Synthetic construct
QAVVTQEPSLTVSPGGTVTLTCRSSTGAVTTSNYANWVQQKPGQAPRGLIGGTNKRAPGVPARFSGSLLGGKAALTLSGAQPEDEAEYYCALWYSNLWVFGGGTKLTVL

SEQ ID NO: 3084 - protein, 109 aa, Synthetic construct
QAVVTQEPSLTVSPGGTVTLTCRSSTGAVTTSNYDNWVQQKPGQAPRGLIGGTNKRAPWTPARFSGSLLGGKAALTITGAQAEDEADYYCALWYSNLWVFGGGTKLTVL

SEQ ID NO: 3085 - protein, 109 aa, Synthetic construct
QAVVTQEPSLTVSPGGTVTLTCRSSAGAVTTSNYDNWVQQKPGQAPRGLIGGTNKRAPWTPARFSGSLLGGKAALTITGAQAEDEADYYCALWYSNLWVFGGGTKLTVL

SEQ ID NO: 3086 - protein, 109 aa, Synthetic construct
QAVVTQEPSLTVSPGGTVTLTCRSSTGAVTTSNYANWVQQKPGQAPRGLIGGTNKRAPGTPARFSGSLLGDKAALTLSGAQPEDEAEYYCALWYSNLWVFGCGTKVTVL

SEQ ID NO: 3087 - protein, 108 aa, Synthetic construct
AVVTQEPSLTVSPGGTVTLTCGSSTGAVTTSNYANWVQQKPGKSPRGLIGGTNKRAPGVPARFSGSLLGGKAALTISGAQPEDEADYYCALWYSNHWVFGGGTKLTVL

SEQ ID NO: 3088 - protein, 113 aa, Synthetic construct
ELVMTQSPSSLTVTAGEKVTMSCKSSQSLLNSGNQKNYLTWYQQKPGQPPKLLIYWASTRESGVPDRFTGSGSGTDFTLTISSVQAEDLAVYYCQNDYSYPLTFGAGTKLEIK

SEQ ID NO: 3089 - protein, 109 aa, Synthetic construct
ELVVTQESALTTSPGETVTLTCRSSTGAVTTSNYANWVQEKPDHLFTGLIGGTNKRAPGVPARFSGSLIGDKAALTITGAQTEDEAIYFCALWYSNLWVFGGGTKLTVL

SEQ ID NO: 3090 - protein, 108 aa, Synthetic construct
AVVTQESALTTWPGETVTLTCRSSTGTITTSNYANWVQEKPDHLFSGLIGINNNRPPGVPARFSGSLIGDKAVLTITGAQTEDEAIYFCALWYSNHWVFGGGTKLTVL

SEQ ID NO: 3091 - protein, 108 aa, Synthetic construct
AVVTQESALTTRPGETVTLTCRSSAGTITTSNYANWVQEKPDHLFSGLIGVNNNRPPGVPARFSGSLIGDTAALTITGAQTEDEAIYFCALWYSNHWVFGGGTKLTVL

SEQ ID NO: 3092 - protein, 108 aa, Synthetic construct
AVVTQESALTTSPGETVTLTCRSSTGTITSDNYANWVQEKPDHLFSGLIGVNNYRPPGVPARFSGSLTGDKAVLTITGAQTEDEAIYFCALWYSNHWVFGGGTKLTVL

SEQ ID NO: 3093 - protein, 98 aa, Synthetic construct
TRPGETVTLTCRSSAGTITTSNYANWVQEKPDHLFSGLIGVNNNRPPGVPARFSGSLIGDTAALTITGAQTEDEAIYFCALWYSNHWVFGGGTKLTVL

SEQ ID NO: 3094 - protein, 98 aa, Synthetic construct
TWPGETVTLTCRSSTGTITTSNYANWVQEKPDHLFSGLIGINNNRPPGVPARFSGSLIGDKAVLTITGAQTEDEAIYFCALWYSNHWVFGGGTKLTVL

SEQ ID NO: 3095 - protein, 107 aa, Synthetic construct
VVTQESALTTSPGETVTLTCRSSSGAVTTNNYANWVQEKPDHLFTGLIGGTNNRAPGVPARFSGSLIGDKAALTITGAQTEDEAIYFCALWFSDHWVFGGGTELTVL

SEQ ID NO: 3096 - protein, 107 aa, Synthetic construct
QTVVTQESALTTSPGETVTFTCRSSAGAVTTSNYANWVQEKPDHLFSGLIGGTTNRAPGVPARFSGSLIGDKAALTITGAQTEDEAIYFCVLWYSDRWVFGGGAKLT

SEQ ID NO: 3097 - protein, 109 aa, Synthetic construct
QTVVTQESALTTSPGETVTFTCRSSAGAVTTSNYANWVQEKPDHLFSGLIGGTTNRAPGVPARFSGSLIGDKAALTITGAQTEDEAIYFCVLWYSDRWVFGGGAKLTVL

SEQ ID NO: 3098 - protein, 109 aa, Synthetic construct
QAVVTQESALTTSPGETVTLTCRSSTGAVTTSNYANWVQEKPDHLFTGLIGGNNNRPPGVPARFSGSLIGDKAALTIAGTQTEDEAIYFCALWYSNHWVFGGGTRLTVL

SEQ ID NO: 3099 - protein, 108 aa, Synthetic construct
AVVTQESALTTSPGETVTLTCRSSTGAVTTSNYANWVQEKPDHLFTGLIGGNNNRPPGVPARFSGSLIGDKAALTIAGTQTEDEAIYFCALWYSNHWVFGGGTRLTVL

SEQ ID NO: 3100 - protein, 108 aa, Synthetic construct
AVVTQESALTTSPGETVTLTCRSSTGAVTTSNYANWVQEKPDHLFTGLIGGNNNRPPGVPARFSGSLIGDKAALTIAGTQTEDEAIYFCALWYSNHWVFGGGTKLTVL

SEQ ID NO: 3101 - protein, 108 aa, Synthetic construct
AVVTQESALTTSPGETVTLTCRSSTGAVTTSNYANWVQEKPDHLFTGLIGGCNNRPPGVPARFSGSLIGDKAALTIAGTQTEDEAIYFCALWYSNHWVFGGGTKLTVL

SEQ ID NO: 3102 - protein, 110 aa, Synthetic construct
RSAVVTQESALTTSPGETVTLTCRSSTGAVTTSNYANWVQEKPDHLFTGLIGGNNNRPPGVPARFSGSLIGDKAALTIAGTQTEDEAIYFCALWYSNHWVFGGGTKLTVL

SEQ ID NO: 3103 - protein, 110 aa, Synthetic construct
RSAVVTQESALTTSPGETVTLTCRSSTGAVTTSNYANWVQEKPDHLFTGLIGGCNNRPPGVPARFSGSLIGDKAALTIAGTQTEDEAIYFCALWYSNHWVFGGGTKLTVL

SEQ ID NO: 3104 - protein, 109 aa, Synthetic construct
QAVVTQESALTTSPGGTVILTCRSSTGAVTTSNYANWVQEKPDHLFTGLIGGTSNRAPGVPVRFSGSLIGDKAALTITGAQTEDDAMYFCALWYSTHYVFGGGTKVTVL

SEQ ID NO: 3105 - protein, 109 aa, Synthetic construct
QAVVTQESALTTSPGETVTLTCRSSTGAVTTSNSANWVQEKPDHLFTGLIGGTINRVPGVPARFSGSLIGDKAALTITGAQTEDEAIYFCALWYSNHWVFGGGTKLTVL

SEQ ID NO: 3106 - protein, 109 aa, Synthetic construct
QAVVTQESALTSSPGETVTLTCRSSTGAVTTSNYANWVQEKPDHLFTGVIGGTNNRAPGVPARFSGSLIGDKAALTITGAQTEDEAIYFCALWYSNHWVFGGGTKLTVL

SEQ ID NO: 3107 - protein, 110 aa, Synthetic construct
RSAVVTQESALTTSPGETVTLTCRSSIGAVTTSNYANWVQEKPDHLFTGLIGGTNNRAPGVPARFSGSLIGDKAALTITGAQTEDEARYFCALWYSCLWVFGGGTKLTVL

SEQ ID NO: 3108 - protein, 110 aa, Synthetic construct
RSAVVTQESALTTSPGETVTLTCRSSIGAVTTSNYANWVQEKPDHLFTGLIGGTNNRAPGVPARFSGSLIGDKAALTITGAQTEDEARYFCALWYSNLWVFGGGTKLTVL

SEQ ID NO: 3109 - protein, 110 aa, Synthetic construct
RSAVVTQESALTTSPGETVTLTCRSSIGAVTTSNYANWVQEKPDHLFTGLIGGTNNRAPGVPARFSGSLIGDKAALTITGAQTEDEARYFCALWYCNLWVFGGGTKLTVL

SEQ ID NO: 3110 - protein, 108 aa, Synthetic construct
AVVTQESALTTSPGETVTLTCRSSIGAVTTSNYANWVQEKPDHLFTGLIGGTNNRAPGVPARFSGSLIGDKAALTITGAQTEDEARYFCALWYCNLWVFGGGTKLTVL

SEQ ID NO: 3111 - protein, 109 aa, Synthetic construct
DIVVTGESALTTSPGETVTLTCRSSTGAVTTSNYANWVQEKPDHLFTGLIGGTNNRAPGVPARFSGSLIGDKAALTITGAQTEDEAIYFCALWYSNHWVFGGGTKLTVL

SEQ ID NO: 3112 - protein, 109 aa, Synthetic construct
QAVVTQESALTTSPGETVTLTCRSSTGAVTTLNYANWVQEKPDHLFTGLIGNTNNRAPGVPARFSGSLIGDKAALTITGAQTEDEAIYFCALWYSNHLVFGGGTKLTVL

SEQ ID NO: 3113 - protein, 109 aa, Synthetic construct
QAVVTQESALTTSPGETVTLTCRSSTGAVTTSNYANWVQEKPDHLFTGLIGNTNNRAPGVPARFSGSLIGDKAALTITGAQTEDEAIYFCALWYNTHLVFGGGTRLTVL

SEQ ID NO: 3114 - protein, 109 aa, Synthetic construct
QAVVTQESALTTSPGETVTLTCRSSAGAVTASNYANWVQEKPDHLFTGLIGGTNIRAPGIPARFSGSLIGDKAALTITGAQTEDEAIYFCVLWFSNHSVFGGGTKLTVL

SEQ ID NO: 3115 - protein, 108 aa, Synthetic construct
QAVVTQESALTTSPGETVTLTCRSSTGAVTTSNYANWVQEKPDHLFTGLIGGTNNRAPGVPARFSGSLIGDKAALTITGAQTEDEAIYFCALWYSNHVFGGGTKLTVL

SEQ ID NO: 3116 - protein, 109 aa, Synthetic construct
DIVVTQESALTTSPGETVTLTCRSSTGAVTTSNYANWVQEKPDHLFTGLIGGTNNRAPGVPARFSGSLIGDKAALTITGAQTEDEAIYFCALWYSNHWVFGGGTKLTVL

SEQ ID NO: 3117 - protein, 109 aa, Synthetic construct
ELVVTQESALTTSPGETVTLTCRSSTGAVTTSNYVNWVQEKPDHLFTGLIGGTNNRAPGVPARFSGSLIGDKAALTITGAQTEDEAIYFCGLWYSNHWVFGGGTKLTVL

SEQ ID NO: 3118 - protein, 109 aa, Synthetic construct
QAVVTQESALTTSPGETVTLTCRSSTGAVTTSNYANWVQEKPDHLFTGLIGGTDNRPPGVPARFSGSLIGDKAALTITGTQTEDEAIYFCALWYSNHWVFGGGTKLTVL

SEQ ID NO: 3119 - protein, 109 aa, Synthetic construct
QAVVTQESALTTSPGGTVILTCRSSTGTITTSNYANWVQKKPNHVFTGLIGATSIRAPGVPVRFSGSLIGGKAALTITGAQTEDDAMYFCALWYNTHYVFGTGTKVTVL

SEQ ID NO: 3120 - protein, 110 aa, Synthetic construct
QAVVTQESALTTSPGETVTLTCRSSTGAVTTSNYANWVQEKPDHLFTGLIGGNNNRPPGVPARFSGSLIGDKAALTIAGTQTEADAIYFCALWYSNHWVFGGGFRGRVLG

SEQ ID NO: 3121 - protein, 109 aa, Synthetic construct
QAVVTQESALTTSPGETVTLTCRSSTGAVTTSNYANWVQEKPDHCFTGLIGGNNNRPPGVPARFSGSLIGDKAALTIAGTQTEDEAIYFCALWYSNHWVFGGGTRLTVL

SEQ ID NO: 3122 - protein, 109 aa, Synthetic construct
QAVVIQESALTTSPGETVTLTCGSSTGAVTASNYANWVQEKPDHCFTGLIGGHNNRPPGVPARFSGSLIGDKAALTIAGTQTEDEAIYFCALWYSDHWVIGGGTRLTVL

SEQ ID NO: 3123 - protein, 95 aa, Synthetic construct
QAVVIQESALTTSPGETVTLTCGSSTGAVTASNYANWVQEKPDHCFTGLIGGHNNRPPGVPARFSGSLIGDKAALTIAGTQTEDEAIYFLCFVVF

SEQ ID NO: 3124 - protein, 109 aa, Synthetic construct
QAVVIQESALTTSPGETVTLTCGSSTGAVTAFNYANWVQEKPDHCFTGLIGGHNNRPPGVPARFSGSLIGGKAALTIAGTQTEDEAIYFCALWYSDHWVIGGGTRLTVL

SEQ ID NO: 3125 - protein, 109 aa, Synthetic construct
QAVVIQESALITSPGETVTLTCGSSTGAVTASNYANWVQEKPDHCFTGLIGGHNNRPPGVPARFSGSLIGDKAALTIAGTQTGDEAIYFCALWYSDHWVIGGGTRLTVL

SEQ ID NO: 3126 - protein, 109 aa, Synthetic construct
QAVVIQESALTTSPGETVTLTCGSSTGAVTAFNYANWVQEKPDHCFTGLIGGHNNRPPGVPARFSGSLIGDKAALTIAGTQTEDEAIYYCALWYSDHWVIGGGTRLTVL

SEQ ID NO: 3127 - protein, 109 aa, Synthetic construct
QAVVIQESALTTSPGETVTLTCGSSTGAVTASNYANWVQEKPDHCFTGLIGGHNNRPPGVPARFSGSLIGDKATLTIAGTQTEDEAIYFCALWYSDHWVIGGGTRLTVL

SEQ ID NO: 3128 - protein, 109 aa, Synthetic construct
QAVVIQESALTTSPGETVTLTCGSSTGAITTSNYANWVQEKPDHCFTGLIGGHNNRPPGVPARFSGSLIGDKAALTIAGTQTEDEAIYFCALWYSDHWVIGGGTRLTVL

SEQ ID NO: 3129 - protein, 109 aa, Synthetic construct
QAVVIQESALTTSPGETVTLTCGSSTGAVTASNYANWVQEKPDHCFTGLIGGHNNRPPGVPARFSGSLIGDKAALTIVGTQTEDEAIYFCALWYSDHWVIGGGTRLTVL

SEQ ID NO: 3130 - protein, 109 aa, Synthetic construct
QAVVIQESALTTSPGETVTLTCGSSTGAVTASNYANWVQEKPDHCFTGLIGGHNNRPPGVPARFSGSLIGDKAALTIAGTQTEDEAIYYCALWYSDHWVIGGGTRLTVL

SEQ ID NO: 3131 - protein, 104 aa, Synthetic construct
QAVVIQESALTTSPGETVTLTCGSSTGAVTASNYANWVQEKPDHCFTGLIGGHNNRPPGVPARFSGSLIGDKAALTIAGTQTEDEAIYFCALWYSDHWVIGWWY

SEQ ID NO: 3132 - protein, 111 aa, Synthetic construct
DIVLTQSPTSLAVSLGQRATISCRASESVDTFGISFMNWFQQKPGQPPKLLIHAASNQGSGVPSRFSGSGSGTDFSLNIHPMEEDDSAMYFCQQSKEVPFTFGSGTKLEIK

SEQ ID NO: 3133 - protein, 111 aa, Synthetic construct
DILLTQTPASLAVSLGQRATISCKASQSVDYDGDSYLNWYQQIPGQPPKLLIYDASNLVSGIPPRFSGSGSGTDFTLNIHPVEKVDAATYHCQQSTEDPWTFGGGTKLEIK

SEQ ID NO: 3134 - protein, 109 aa, Synthetic construct
QAVVTQESALTTSPGETVTLTCRSSTGAVITSNDANWVQEKPDHSFTGLIGGTNNRAPGVPARFSGSLIGDKAALTITGAQTEDEAIYFCALWYSNHWVFGGGTKLTVL

SEQ ID NO: 3135 - protein, 109 aa, Synthetic construct
QTVVTQESALTTSPGETVTLTCRSSTGVVTTSNYANWVQEKPDHLFTGLIVGTNNRVPGVPPRFSGSLIGDKAALTITGAQTEDEAIYFCALWYSNHWVFGGGTKLTVL

SEQ ID NO: 3136 - protein, 113 aa, Synthetic construct
QAVVTQESALTTSPGETVTLTCRSSTGAVTTSNYANWVQEKPDHLFTGLIGGTNNRAPGVPARFSGSLIGDKAALTITGAQTEDEAIYFCALWYSNHEQFVWVFGGGTKLTVL

SEQ ID NO: 3137 - protein, 109 aa, Synthetic construct
QAVVTQESALTTSPGETVTLTCRSNTGAVTTSNYANWVQEKPDHLFTGLIGGTNNRAPGVPARFSGSLIGDKAALTITGAQTEDEAIYFCALWYSNHWVFGGGTKLTVL

SEQ ID NO: 3138 - protein, 109 aa, Synthetic construct
QAVVTQESALTTSPGETVTLTCRSSTGAVTTSNYANWVQEKPDHLFTGLIGGTNNRVSGVPARFSGSLIGDKAALTITGAQTEDEAIYFCALWYSNHWVFGGGTKLTVL

SEQ ID NO: 3139 - protein, 109 aa, Synthetic construct
QAVVTQESALTTSPGGTVILTCRSSTGAVTTSNYANWIQEKPDHLFTGLIGGTSNRAPGVPVRFSGSLIGDKAALTITGAQTEDDAMYFCALWFRNHFVFGGGTKVTVL

SEQ ID NO: 3140 - protein, 109 aa, Synthetic construct
QAVVTQESALTTSPGETVTLTCRSSTGAVTTNNYANWVQENPDHLFTGLIDGTNTRSPGVPARFSGSLIGDKAALTITGAQTEDEAIYFCALWYSNHWVFGGGTKLTVL

SEQ ID NO: 3141 - protein, 100 aa, Synthetic construct
LTTAPGGTVILTCRSSTGAVTTNNYANWVQEKPDHLFTGLIDATSNRVPGVPVRFSGSLIGDKAALTITGAQTEDDAMYFCALWYNTHFVFGGGTKVTVL

SEQ ID NO: 3142 - protein, 109 aa, Synthetic construct
QAVVTQESALTTSPGETVTLTCRSSTGAVTTSNNANWVQEKPDHLFTGLIGATNNRAPGVPARFSGSLIGDKAALTITGAQTEDEAIYFCALWYINHWVFGGGTKLTVL

SEQ ID NO: 3143 - protein, 109 aa, Synthetic construct
QAVVTQESALTTSPGETVTLTCRSSTGAVTTSNYANWVQEKPDHLFTGLIGGTNNRAPGVPARFSGSLIGDKAALTITGTQTEDEAMYFCALWYSNHWVFGGGTKLTVL

SEQ ID NO: 3144 - protein, 110 aa, Synthetic construct
QAVVTQESALTTSPGETVTLTCRSSAGAVTTSNFANWVQEKPDHLFTGLIGDTNIRAPGVPARFSGSLIGDKAALTITGAQTEDEAIYFCALWYSNHYWVFGGGTKLTVL

SEQ ID NO: 3145 - protein, 109 aa, Synthetic construct
QAVVTQESALTTSPGETITLTCRSSTGAVTTSNYANWVQEKPDHLFTGLIGGTNNRAPGVPARFSGSLIGDKAALTITGAQTEDEAIYFCALWYSNHYVFGSGTKVTVL

SEQ ID NO: 3146 - protein, 109 aa, Synthetic construct
QAVVTQESALTTSPGGTVILTCRSSTGAVTTSNNANWVQEKPDHLFTGLIGGTSNRAPGVPVRFSGSLIGDKAALTITGAQTEDDAMYFCALWYSTHYVFGGGTKVTVL

SEQ ID NO: 3147 - protein, 110 aa, Synthetic construct
QAVVTQESALTTSPGETVTLTCRSSTGAVTTSNYANWVQEKPDHSFTSLIGGTNNRAPGVPARFSGSLIGDKAALTITGAQTEDEAIYFCALWYSNHFWVFGGGTKLTVL

SEQ ID NO: 3148 - protein, 110 aa, Synthetic construct
QAVVTQESALTTSPGETVTLTCRSSTGAVTTSNYANWVQEKPDHLFTGLISGTNNRAPGVPARFSGSLIGDKAALTITGAQTEDEAIYFCALWYSNHFWVFGGGTKLTVL

SEQ ID NO: 3149 - protein, 104 aa, Synthetic construct
QAVVTQESALTTSPGETVTLTCRSSTGAVTTSNYANWVQEKPDHLFTGLIGGTNNRAPGVPARFSGSLIGDKAALTITGAQTEDEAIYFCALWYSNHWVFGGGT

SEQ ID NO: 3150 - protein, 109 aa, Synthetic construct
QAVVTQESALTTSPGETVTLTCRSSTGAVTTSNYANWVQEKPDHLFTGLIGGTNNRAPGIPARFSGSLIGDKAALTITGAQTEDEAIYFCALWYSNHWVFGGGTKLTVL

SEQ ID NO: 3151 - protein, 103 aa, Synthetic construct
QAVVTQESALTTSPGETVTLTCRSSTGAVTTSNYANWVQEKPDHLFTGLIGGTNNRAPGVPARFSGSLIGDKAALTITGAQTEDEAIYFCALWYSNHWVFGGG

SEQ ID NO: 3152 - protein, 100 aa, Synthetic construct
LTTSPGGTVILTCRSSTGAVTTDNYANWVQEKPDHLFTGLIDATSNRVPGVPVRFSGSLIGDKAALTITGAQTEDDAMYFCALWYNTHFVFGGGTKVTVL

SEQ ID NO: 3153 - protein, 109 aa, Synthetic construct
QAVVTQESALTTSPGETVTLTCRSSTGAVTTSNYANWVQEKPDHLFTGLTGGTNNRAPGVPARFSGSLIGDKAALTITGAQTEDEAIYFCALWYSNHWVFGGGTKLTVL

SEQ ID NO: 3154 - protein, 109 aa, Synthetic construct
QAVVTQESALTTSPGETVTLTCRSSTGAVTTSNYANWVQEKPDHLFTGLIRGTNNRAPGVPARFSGSLIGDKAALTITGAQTEDEAIYFCALWYSNHWVFGGGTKLTVL

SEQ ID NO: 3155 - protein, 109 aa, Synthetic construct
QAVVTQESALTTSPGETVTLTCRSSTGAVTTSNYANWVQEKPDHLFTGLIGGTNNRAPDVPARFSGSLIGDKAALTITGAQTEDEAIYFCALWYSNHWVFGGGTKLTVL

SEQ ID NO: 3156 - protein, 109 aa, Synthetic construct
QAVVTQESALTTSPGETVTLTCRSSTGAVTTSNYANWVQEKPDHLFTGLIGGTNNRSPGVPARFSGSLIGDKAALTITGAQTEDEAIYFCALWYSNHLVFGGGTKLTVL

SEQ ID NO: 3157 - protein, 108 aa, Synthetic construct
RSQLTQESALTTSPGETVTLTCRSSTGAVTTSNYATWVQEKPDHLFTGLIGGTKNRAPGVPARFSGSLIGDKAALTITGAQTEDEAIYFCALWYSNHWVFGGGTKLKI

SEQ ID NO: 3158 - protein, 109 aa, Synthetic construct
QAVVTQESALTTSPGETVTLTCRSSTGAVTSTNYANWVQEKPDHLFTGLIGGTNNRAPGVPARFSGSLIGDKAALTITGAQTEDEAIYFCALWYSNHWVFGGGTKLTVL

SEQ ID NO: 3159 - protein, 109 aa, Synthetic construct
QAVVTQESALTTSPGETVTLTCRSSTGAVTASNYANWVQEKPDHSFTGLIGGINNRAPGVPARFSGSLIGDKAALTITGAQTEDEAIYFCALWYNNHWVFGGGTKLTVL

SEQ ID NO: 3160 - protein, 105 aa, Synthetic construct
DAVVTQESALTTSPGETVTLTCRSSTGAVTKNNFANWVQEKPDHLFTGLIGGNNIRAPGVPARFSGSLIGDKAALSITGAQTEDEAIYFCALWYSNHWVFGGGTK

SEQ ID NO: 3161 - protein, 105 aa, Synthetic construct
DAVVTQESALTTSPGETVTLTCRSSTGAVTTSNFANWVQEKPDHLFTGLISSNNKRAPGVPARFSGSLIGDKAALSITGAQTEDEAIYFCALWYSNHWVFGGGTK

SEQ ID NO: 3162 - protein, 105 aa, Synthetic construct
DAVVTQESALTTSPGGTVILTCRSSTGAVTTSNFANWVQEKPDHLFSGLISGNNKRAPGVPARFSGSLIGDKAALSITGAQTEDEAMYFCALWYNNHWVFGGGTK

SEQ ID NO: 3163 - protein, 109 aa, Synthetic construct
QAVVTQESALTTSPGETVTLTCRSSTGAVTTSYYANWVQEKPDHLFTGLIGGTNYRAPGVPARFSGSLIGDKAALTITGAQTEDEAIYFCALWYNNHWVFGGGTKLTVL

SEQ ID NO: 3164 - protein, 109 aa, Synthetic construct
QAVVTQESALTTSPGETVTLTCRSSTGAVTTSNYANWVQEKPDHLFTGLIGGTVNRAPGVPARFSGSLIGDKAALTITGAQTEDEAVYFCALWYSNHLVFGGGTKLTVL

SEQ ID NO: 3165 - protein, 109 aa, Synthetic construct
QAVVTQESALTTSPGGTVTLTCRSSTGTITTSNYANWVQKKPNHVFTGLIGATSIRAPGVPVRFSGSLIGGKAALTITGAQTEDDAMYFCALWYNTHYVFGGGTKVTVL

SEQ ID NO: 3166 - protein, 109 aa, Synthetic construct
QAVVTQESALTTSPGETVTLTCRSSTGAVTTSNYANWVQEKPDHLFTGLIGGTNNRAPGVPARFSGSLIGDKAALTITGAQTEDEAIYFCSLWYSNHLVFGGGTKLTVL

SEQ ID NO: 3167 - protein, 113 aa, Synthetic construct
GAISQAVLTQESALTTSPGETVTLTCRSSTGAVTTSNYANWVQEKPDHLFTGLIGGTNNRVPGVPARFSGSLIGDKAALTITGAQTEDEAIYFCVLWHSNHWVFGGGTKLTVL

SEQ ID NO: 3168 - protein, 109 aa, Synthetic construct
QAVVTQESALTTSPGETVTLTCRSSTGAVTTSNYANWVQEKPDHLFTGLIGGTNNRAPGVPARFSGSLIGDKAALTITGAQTEDEAIYFCALWYSNHRVFGGGTKLTVL

SEQ ID NO: 3169 - protein, 109 aa, Synthetic construct
QAVVTQESALTTSPGETVTLTCRSSTGAVTTNNYANWVQEKPDHLFTGLIGGTNSRAPGVPARFSGSLIGDKAALTITGAQTEDEAMYFCALWYSNHWVFGGGTKLTVL

SEQ ID NO: 3170 - protein, 109 aa, Synthetic construct
QAVVTQESALTTSPGETVTLTCRSSTGAVTTSNYATWVQEKPDHLFTGLIGGTNNRAPGVPARFSGSLIGDKAALTLTGAQTEDEAIYFCALWYSNHWVFGGGTKLTVL

SEQ ID NO: 3171 - protein, 109 aa, Synthetic construct
QAVVTQESALTTSPGETVTFTCRSSTGAVTTSNYANWVQEKPDHLFTGLIGGTNNRAPGVPARFSGSLIGDKAALTITGAQTEDEAIYFCALWYSNHWVFGGGTKLTVL

SEQ ID NO: 3172 - protein, 109 aa, Synthetic construct
QAVVTQESALTTSPGETVTLTCRSSTGAVTTSNYANWVQEKPDHLFTGLIGGTNNRAPGVPARFSGSLIGDKAALTITGAQTEDEAIYFCVLWYSNHWVFGGGTKLTVL

SEQ ID NO: 3173 - protein, 109 aa, Synthetic construct
QAVVTQESALTTSPGETVTLTCRSSTGAVTTSNYANWVQEKPDHLFTGLIGGTNNRAPGVPARFSGSLIGDRAALTITGAQTEDETIYFCALWLSNHWVFGGGTKLTVL

SEQ ID NO: 3174 - protein, 109 aa, Synthetic construct
QAVVTQESALTTSPGETVTLTCRSTTGAVTTSNYANWVQEKPDHLFTGLMGGTNNRAPGVPARFSGSLIGDKAALTITGAQTEDEAIYFCALWYSNHWVFGGGTKLTVL

SEQ ID NO: 3175 - protein, 109 aa, Synthetic construct
QAVVTQESALTTSPGETVTLTCRSSTGAVTTSNYANWVQEKPDHLFTGLIGGTDNRAPGVPARFSGSLIGDRAALTITGAQTEDAAIYFCALWSSNHWVFGGGTKLTVL

SEQ ID NO: 3176 - protein, 109 aa, Synthetic construct
QAVVTQESALTTSPGETVTLTCRSSTGAVTTSNYANWVQEKPDHLFTGLIGGTNNRTPGVPARFSGSLIGDKAALTITGTQTEDEAIYFCALWYSNHWVFGGGTKLTVL

SEQ ID NO: 3177 - protein, 109 aa, Synthetic construct
QAVVTQESALTTSPGETVTLTCRSSTGAVTTSNYANWVQEKPDHLFTGLIGGTNNRAPGVPARFSGSLIGDKAALTITGAQTEDEAIYFCALWSNNHWVFGGGTKLTVL

SEQ ID NO: 3178 - protein, 109 aa, Synthetic construct
QAVVTQESALTTSPGETVILTCRSSTGAVTTSNYANWVQEKPDHLFTGLIGGTNNRAPGVPARFSGSLIGDKAALTITGAQTEDEAIYFCALWYSNHWVFGGGTKLTVL

SEQ ID NO: 3179 - protein, 109 aa, Synthetic construct
QAVVTQESALTTSPGETVTLTCRSSTGAVTTSNYANWVQEKPDHLFTGLIGGTNNRAPGVPARFSGSLIGDKAALTITGAQTEDAAIYFCALWCSNHWVFGGGTKLTVL

SEQ ID NO: 3180 - protein, 109 aa, Synthetic construct
QAVVTQESALITSPGETVTLTCRSSTGAVTTSNYANWVQEKPDHLFTGLIGGTNNRAPGVPARFSGSLIGDKAALTITGAQTEDEAIYFCALWYSNHWVFGGGTKLTVL

SEQ ID NO: 3181 - protein, 109 aa, Synthetic construct
QAVVTQESALTTSPGETVTLTCRSSIGAVTTTNYANWVQEKPDHLFTGLIGGTNNRAPGVPARFSGSLIGDKAALTITGAQTEDEAIYFCALWYSNHWVFGGGTKLTVL

SEQ ID NO: 3182 - protein, 111 aa, Synthetic construct
DIVLTQSPASLAMSLGKRATISCRASESVSVIGAHLIHWYQQKPGQPPKLLIYLASNLETGVPARFSGSGSGTDFTLTIDPVEEDDVAIYSCLQSRIFPRTFGGGTKLEIK

SEQ ID NO: 3183 - protein, 111 aa, Synthetic construct
DIQLTQSPASLAVSLGQRATISCKASQSVDYDGDSYLNWYQQIPGQPPKLLIYDASNLVSGIPPRFSGSGSGTDFTLNIHPVEKVDAATYHCQQSTEDPWTFGGGTKLEIK

SEQ ID NO: 3184 - protein, 109 aa, Synthetic construct
QAVVTQEPSLTVSPGGTVTLTCRSSTGAVTTSNYANWVQQKPGQAPRGLIGGTNKRAPWTPARFSGSLLGDKAALTLSGAQPEDEAEYFCALWYSNLWVFGGGTKLTVL

SEQ ID NO: 3185 - protein, 109 aa, Synthetic construct
QAVVTQESALTTSPGETVTLTCRSSTGAVTTSNYANWVQEKPDHLFTGLIGGTNFRAPGVPARFSGSLIGDKAALTITGAQTEDEAIYFCALWYSNLWVFGGGTKLTVL

SEQ ID NO: 3186 - protein, 109 aa, Synthetic construct
QTVVTQEPSLTVSPGGTVTLTCGSSTGAVTTSNYPNWVQQKPGQAPRGLIGGTNFLAPGTPARFSGSLLGGKAALTLSGVQPEDEAEYYCALWYSNLWVFGGGTKLTVL

SEQ ID NO: 3187 - protein, 109 aa, Synthetic construct
QTVVTQEPSLTVSPGGTVTLTCASSTGAVTTSNYANWVQQNPGQAPRGLIGGTNKKAPGTPARFSGSLLGGKAALTLSGVQPEDEAEYYCALWYSNLWVFGGGTKLTVL

SEQ ID NO: 3188 - protein, 109 aa, Synthetic construct
QTVVTQEPSLTVSPGGTVTLTCGSSTGAVTTSNYPNWVQQKPGQAPRGLIGGTNKKAPGTPARFSGSLLGGKAALTLSGAQPEDEAEYYCALWYSNLWVFGGGTKLTVL

SEQ ID NO: 3189 - protein, 109 aa, Synthetic construct
QAVVTQEPSLTVSPGGTVTLTCRSSTGAVTTSNYANWVQQKPGQAPRGLIGGTNKRAPGVPARFSGSLLGDKAALTLSGAQPEDEAEYYCALWYSNLWVFGTGTKVTVL

SEQ ID NO: 3190 - protein, 109 aa, Synthetic construct
QAVVTQESALTTSPGETVTLTCRSSTGAVTTSDYAHWVQEKPDHLFTGLIGGTNNRAPGVPARFSGSLIGDKAALTITGAQTEDEAIYFCALWYSNHWVFGGGTKLTVL

SEQ ID NO: 3191 - protein, 109 aa, Synthetic construct
QAVVTQESALTTSPGETVTLTCRSSTGAVTTSNYANWVQEKPDHLFTGLIGGTNNRAPGVPARFSGSLIGDKAALTITGAQTEDEAIYFCALRYSNHWVFGGGTKLTVL

SEQ ID NO: 3192 - protein, 109 aa, Synthetic construct
QAVVTQESALTTSPGETVTLTCRSSTGAVTTSNYANWVQEKPDHLFTGLIGGTNNRAPGVPARFSGSLIGDKAALTITGAQTEDEAIYFCVLRYSNHWVFGGGTKLTVL

SEQ ID NO: 3193 - protein, 110 aa, Synthetic construct
QAVVTQESALTTSPGETVTLTCRSSTGAVTTSNYANWVQEKPDHLFTGLVGDTNNRAPGVPARFSGSLIGDKAALTITGAQTEDEAIYFCALWYNNHSWVFGGGTKLEIN

SEQ ID NO: 3194 - protein, 109 aa, Synthetic construct
ELVVTQEPSLTVSPGGTVTLTCRSSNGAVTSSNYANWVQQKPGQAPRGLIGGTNKRAPGTPARFSGSLLGGKAALTLSGVQPEDEAVYYCALWYPNLWVFGGGTKLTVL

SEQ ID NO: 3195 - protein, 109 aa, Synthetic construct
ELVVTQEPSLTVSPGGTVTLTCRSSNGEVTTSNYANWVQQKPGQAPRGLIGGTIKRAPGTPARFSGSLLGGKAALTLSGVQPEDEAVYYCALWYPNLWVFGGGTKLTVL

SEQ ID NO: 3196 - protein, 109 aa, Synthetic construct
ELVVTQEPSLTVSPGGTVTLTCRSSNGAVTSSNYANWVQQKPGQAPRGLIGGTNKRAPGTPARFSGSSLGGKAALTLSGVQPEDEAVYYCALWYPNLWVFGGGTKLTVL

SEQ ID NO: 3197 - protein, 109 aa, Synthetic construct
ELVVTQEPSLTVSPGGTVTLTCRSSNGAVTSSNYANWVQQKPGQAPRGLIGGTNKRAPGTPARFSGSLLGGSAALTLSGVQPEDEAVYYCALWYPNLWVFGGGTKLTVL

SEQ ID NO: 3198 - protein, 109 aa, Synthetic construct
ELVVTQEPSLTVSPGGTVTLTCRSSNGAVTSSNYANWVQQKPGQAPRGLIGGTNKRAPGTPARFSGSSLGGSAALTLSGVQPEDEAVYYCALWYPNLWVFGGGTKLTVL

SEQ ID NO: 3199 - protein, 109 aa, Synthetic construct
ELVVTQEPSLTVSPGGTVTLTCRSSTGAVTTSNYANWVQQKPGQAPRGLIGGTNKRAPGTPARFSGSSLGGSAALTLSGVQPEDEAEYYCALWYSNLWVFGGGTKLTVL

SEQ ID NO: 3200 - protein, 109 aa, Synthetic construct
ELVVTQEPSHTVSPGGTVTLTCRSSTGAVTSSNYANWVQQKPGQAPRGLIGGTIKRAPGTPARFSGSLLGGKAALTLSGVQPEDEAEYYCALWYPNLWVFGGGTKLTVL

SEQ ID NO: 3201 - protein, 109 aa, Synthetic construct
ELVVTQEPSHTVSPGGTVTLTCRSSTGEVTTSNYANWVQQKPGQAPRGLIGGTIKRAPGTPARFSGSLLGGKAALTLSGVQPEDEAEYYCALWYPNLWVFGGGTKLTVL

SEQ ID NO: 3202 - protein, 109 aa, Synthetic construct
EAVVTQEPSLTVSPGGTVTLTCRSSTGAVTTSNYANWVQDKPGQAPRGLIGGTNKRAPWTPARFSGSLLGGKAALTITGAQPEDEAGYYCALWYSNLWVFGGGTKLTVL

SEQ ID NO: 3203 - protein, 109 aa, Synthetic construct
EAVVTQEPSLTVSPGGTVTLTCRSSTGAVTTSNYANWVQQKPGQAPRGLIGGTNKRAPWTPARFSGSLLGGKAALTITGAQPEDEAEYYCALWYSNLWVFGGGTKLTVL

SEQ ID NO: 3204 - protein, 109 aa, Synthetic construct
DAVVTQESALTSSPGETVTLTCRSSTGAVTTSNYASWVQEKPDHLFTGLIGGTNNRAPGVPARFSGSLIGDKAALTITGAQTEDEAIYFCVLWYSNHWVLGGGTKLTVL

SEQ ID NO: 3205 - protein, 109 aa, Synthetic construct
QAVVTQESALTTSPGETVTLTCRSSTGAVTTNNYANWVQEKPDHLFTGLIGGTNNRGPGVPARFSGSLIGDKAALTITGAQTEDEAIYFCALWYSNHWVFGGGTKLTVL

SEQ ID NO: 3206 - protein, 109 aa, Synthetic construct
QAVVTQEPSLTVSPGGTVTLTCGSSTGAVTSSNYANWVQQKPGQAPRGLIGGTNKRAPWTPARFSGSLLGGKAALTLSGAQPEDEAEYYCALWYSNLWVFGGGTKLTVL

SEQ ID NO: 3207 - protein, 109 aa, Synthetic construct
QAVVTQESALTTSPGETVTLTCRSSTGAVTTTNYANWVQEKPDHLFTGLIGGTNNRAPGVPARFSGSLIGDKAALTITGAQTDDEAIYFCALWYSNRWVFGGGTKLTVL

SEQ ID NO: 3208 - protein, 109 aa, Synthetic construct
QAVVTQEPSLTVSPGGTVTLTCRSSTGAVTTSNYANWVQQKPGQAPRGLIGGTNKRAPGTPARFSGSLLGGKAALTITGAQAEDEADYYCALWYSNLWVFGGGTKLTVL

SEQ ID NO: 3209 - protein, 90 aa, Synthetic construct
DIQMTQSPSSLSASVGDRVTITCRASQSVSSAVAWYQQKPGKAPKLLIYSASSLYSGVPSRFSGSRSGTDFTLTISSLQPEDFATYYCQQ

SEQ ID NO: 3210 - protein, 109 aa, Synthetic construct
QVVVTQESALTTSPGETVTLTCRSSTGAVTTSNYANWVQEKPDHLFTGLIGGINNRAPGVPARFSGSLIGDKAALTITGAQTEDEAIYFCALWYSNHWVFGGGTKLTVL

SEQ ID NO: 3211 - protein, 108 aa, Synthetic construct
QAIVTQESALTTSPGETVTLTCRSSTGAVTTSNYATWVQEKPDHLFTGLMGGTNIRAPGVPARFSGSLIGDKAALTITGAQTEDEAIYFCALWYNNHLVFGGGTKLTV

SEQ ID NO: 3212 - protein, 109 aa, Synthetic construct
QAVVTQEPSLTVSPGGTVTLTCRSPTGAVTTSNYANWVQQKPGQAPRGLIGGTNKRAPWTPARFSGSLLGGKAALTITGAQAEDEADYYCALWYSNLWVFGGGTKLTVL

SEQ ID NO: 3213 - protein, 109 aa, Synthetic construct
QAVVTQEPSLTVSPGGTVTLTCPSSTGAVTTSNYANWVQQKPGQAPRGLIGGTNKRAPWTPARFSGSLLGGKAALTITGAQAEDEADYYCALWYSNLWVFGGGTKLTVL

SEQ ID NO: 3214 - protein, 109 aa, Synthetic construct
QAVVTQEPSLTVSPGGTVTLTCRSSTGAVLTSNYANWVQQKPGQAPRGLIGGTNKRAPWTPARFSGSLLGGKAALTITGAQAEDEADYYCALWYSNLWVFGGGTKLTVL

SEQ ID NO: 3215 - protein, 109 aa, Synthetic construct
QAVVTQEPSLTVSPGGTVTLTCRSSTGASTTSNYANWVQQKPGQAPRGLIGGTNKRAPWTPARFSGSLLGGKAALTITGAQAEDEADYYCALWYSNLWVFGGGTKLTVL

SEQ ID NO: 3216 - protein, 110 aa, Synthetic construct
QAVVTQEPSLTVSPGGTVTLTCRFSTGAVTTSNYANWVQQKPGQAPRGLIGGTNKRAPWTPARFSGSLLGGKAALTITGAQAEDEADYYCALWYSNLWVFGGGTKLTVTG

SEQ ID NO: 3217 - protein, 110 aa, Synthetic construct
QAVVTQEPSLTVSPGGTVTLTCRSSTGAVTTSNYANWVQQKPGQAPRGLIGGTNKRAPWTPARFSGSLLGGKAALTITGAQAEDEADYYCALWYSNLWVFGGGTKLTVQG

SEQ ID NO: 3218 - protein, 109 aa, Synthetic construct
QAVVTQEPSLTVSPGGTVTLTCRSSTGAVTTSNYENWVQQKPGQAPRGLIGGTNKRAPWTPARFSGSLLGGKAALTITGAQAEDEADYYCALWYSNLWVFGGGTKLTVL

SEQ ID NO: 3219 - protein, 109 aa, Synthetic construct
QAVVTQEPSLTVSPGGTVTLTCRSSTGAVTTSNYANWVQQKPGQAPRGLIGGTNKRAPWTPARFSGSLLGGKAALTITGAQAEDEADYYCKLWYSNLWVFGGGTKLTVL

SEQ ID NO: 3220 - protein, 109 aa, Synthetic construct
QAVVTQEPSLTVSPGGTVTLTCRSSTGAVTTKNYDNWVQQKPGQAPRGLIGGTNKRAPWTPARFSGSLLGGKAALTITGAQAEDEADYYCALWYSNLWVFGGGTKLTVL

SEQ ID NO: 3221 - protein, 109 aa, Synthetic construct
QAVVTQEPSLTVSPGGTVTLTCRSSTGAVTTSNYDNWVQQKPGQAPRGLIGGTNKRAPWTPARFSGSLLGGKAALTITGAQAEDEADYYCALWYSNHWVFGGGTKLTVL

SEQ ID NO: 3222 - protein, 109 aa, Synthetic construct
QAVVTQEPSLTVSPGGTVTLTCRSSTGAVTYSNYDNWVQQKPGQAPRGLIGGTNKRAPWTPARFSGSLLGGKAALTITGAQAEDEADYYCALWYSNLWVFGGGTKLTVL

SEQ ID NO: 3223 - protein, 109 aa, Synthetic construct
QAVVTQEPSLTVSPGGTVTLTCRSSTGAVTWSNYDNWVQQKPGQAPRGLIGGTNKRAPWTPARFSGSLLGGKAALTITGAQAEDEADYYCALWYSNLWVFGGGTKLTVL

SEQ ID NO: 3224 - protein, 109 aa, Synthetic construct
QAVVTQEPSLTVSPGGTVTLTCRSSTGAVTTSNYANWVQQKPGQAPRGLIYGTNKRAPGVPARFSGSLLGGKAALTLSGAQPEDEAEYYCALWYSNLWVFGGGTKLTVL

SEQ ID NO: 3225 - protein, 109 aa, Synthetic construct
QAVVTQEPSLTVSPGGTVTLTCRSSTGAVTTSNYANWVQQKPGQAPRGLIGGTNKRAPWVPARFSGSLLGGKAALTLSGAQPEDEAEYYCALWYSNLWVFGGGTKLTVL

SEQ ID NO: 3226 - protein, 109 aa, Synthetic construct
QAVVTQEPSLTVSPGGTVTLTCRSSTGAVTTSNYANWFQQKPGQAPRGLIGGTNKRAPGVPARFSGSLLGGKAALTLSGAQPEDEAEYYCALWYSNLWVFGGGTKLTVL

SEQ ID NO: 3227 - protein, 109 aa, Synthetic construct
QAVVTQEPSLTVSPGGTVTLTCRSSTGAVTTSNYANWFQQKPGQAPRGLIGGTNKRAPWVPARFSGSLLGGKAALTLSGAQPEDEAEYYCALWYSNLWVFGGGTKLTVL

SEQ ID NO: 3228 - protein, 109 aa, Synthetic construct
QAVVTQEPSLTVSPGGTVTLTCRSSTGAVTTSNYANWVQQKPGQAPRTLIGGTNKRAPGVPARFSGSLLGGKAALTLSGAQPEDEAEYYCALWYSNLWVFGGGTKLTVL

SEQ ID NO: 3229 - protein, 109 aa, Synthetic construct
QAVVTQEPSLTVSPGGTVTLTCRSSTGAVTTSNYANWVQQKPGQAPRGLIGGTNNRAPGTPARFSGSLLGGKAALTLSGAQPEDEAEYYCALWYSNLWVFGGGTKLTVL

SEQ ID NO: 3230 - protein, 109 aa, Synthetic construct
QAVVTQESALTTSPGETVTLTCRSSTGAVTTSNYANWVQEKPDHLFTGLIGGINNRVPGVPARFSGSLIGDKAALTITGAQTEDEAIYFCALWYSNHWVFGGGTKLTVL

SEQ ID NO: 3231 - protein, 109 aa, Synthetic construct
QAVVTQESALTTSPGETVTLTCRSSTGAVTTSNYANWDQEKPDHLFTGLIGGTNNRAPGVPARFSGSLIGDKAALTITGAQTEDEAIYFCALWYSNHLVFGGGTKVTVL

SEQ ID NO: 3232 - protein, 109 aa, Synthetic construct
QAVVTQESALTTSPGEAVTLTCRSSSGAVTTSNYANWVQEKPDHLFAGLIGGTNDRAPGVPARFSGSLIGDKAALTITGAQTEDEAIYFCALWFSNHWVFGGGTKLTVL

SEQ ID NO: 3233 - protein, 109 aa, Synthetic construct
QAVVTQESALTTSPGETVTLTCRSSSGAVTTSNYANWVQEKPDHLFTGLIGGTNNRAPGVPARFSGSLIGDKAALTITGAQTEDEAIYFCGLWYSNHWVFGGGTKLTVL

SEQ ID NO: 3234 - protein, 109 aa, Synthetic construct
QAVVTQESALTTSPGETVTLTCRSSTGAVTTSNYANWVQEKPDHLFTGLIGGTDNRPPGVPARFSGSLIGDKAALTITGAQTEDEAIYFCALWYSNLWVFGGGTKLTVL

SEQ ID NO: 3235 - protein, 109 aa, Synthetic construct
QAVVTQEPSLTVSPGGTVTLTCRSSSGAVTTSNYANWFQQKPGQAPRTLISGTNDRAPWTPARFSGSLLGGKAALTLSGAQPEDEADYFCALWFSNHWVFGGGTKLTVL

SEQ ID NO: 3236 - protein, 109 aa, Synthetic construct
QAVVTQEPSLTVSPGGTVTLTCRSSSGAVTTSNYANWFQQKPGQAPRGLISGTNDRAPWVPARFSGSLLGGKAALTISGAQPEDEADYFCALWFSNHWVFGGGTKLTVL

SEQ ID NO: 3237 - protein, 109 aa, Synthetic construct
QAVVTQEPSLTVSPGGTVTLTCRSSSGAVTTSNYANWVQQKPGQAPRGLISGTNDRAPWVPARFSGSLLGGKAALTLSGAQPEDEADYFCALWFSNHWVFGGGTKLTVL

SEQ ID NO: 3238 - protein, 109 aa, Synthetic construct
QAVVTQEPSLTVSPGGTVTLTCRSSSGAVTTSNYANWVQQKPGQAPRGLISGTNDRAPWVPARFSGSLLGGKAALTISGAQPEDEADYFCALWFSNHWVFGGGTKLTVL

SEQ ID NO: 3239 - protein, 109 aa, Synthetic construct
QAVVTQEPSLTVSPGGTVTLTCRSSSGAVTTSNYANWVQQKPGQAPRGLIGGTNDRAPWVPARFSGSLLGGKAALTLSGAQPEDEADYFCALWFSNHWVFGGGTKLTVL

SEQ ID NO: 3240 - protein, 109 aa, Synthetic construct
QAVVTQEPSLTVSPGGTVTLTCRSSSGAVTTSNYANWVQQKPGQAPAGLIGGTNDRAPWVPARFSGSLLGGKAALTLSGAQPEDEADYFCALWFSNHWVFGGGTKLTVL

SEQ ID NO: 3241 - protein, 109 aa, Synthetic construct
QAVVTQEPSLTVSPGGTVTLTCRSSSGAVTTSNYANWVQQKPGQLFATLISGTNDRAPWTPARFSGSLLGGKAALTLSGAQPEDEAIYFCALWFSNHWVFGGGTKLTVL

SEQ ID NO: 3242 - protein, 109 aa, Synthetic construct
QAVVTQEPSLTVSPGGTVTLTCRSSSGAVTTSNYANWVQEKPGQAPRGLISGTNDRAPWVPARFSGSLLGGKAALTISGAQPEDEADYFCALWFSNHWVFGGGTKLTVL

SEQ ID NO: 3243 - protein, 109 aa, Synthetic construct
QAVVTQEPSLTVSPGGTVTLTCRSSSGAVTTSNYANWVQEKPGQAFRGLISGTNDRAPWVPARFSGSLLGGKAALTLSGAQPEDEADYFCALWFSNHWVFGGGTKLTVL

SEQ ID NO: 3244 - protein, 109 aa, Synthetic construct
QAVVTQEPSLTTSPGGTVTLTCRSSSGAVTTSNYANWVQQKPGQAPRGLIGGTNDRAPWVPARFSGSLLGGKAALTLSGAQPEDEADYFCALWFSNHWVFGGGTKLTVL

SEQ ID NO: 3245 - protein, 109 aa, Synthetic construct
QAVVTQEPSLTVSPGGTVTLTCRSSSGAVTTSNYANWFQQKPGQLFAGLISGTNDRAPGTPARFSGSLLGGKAALTLSGAQPEDEAIYFCALWFSNHWVFGGGTKLTVL

SEQ ID NO: 3246 - protein, 109 aa, Synthetic construct
QAVVTQEPSLTVSPGGTVTLTCRSSSGAVTTSNYANWVQQKPGQAPAGLIGGTNDRAPGVPARFSGSLLGGKAALTLSGAQPEDEADYFCALWFSNHWVFGGGTKLTVL

SEQ ID NO: 3247 - protein, 109 aa, Synthetic construct
QAVVTQEPSLTVSPGGTVTLTCRSSSGAVTTSNYANWVQQKPGQLFAGLIGGTNDRAPWTPARFSGSLLGGKAALTLSGAQPEDEADYFCALWFSNHWVFGGGTKLTVL

SEQ ID NO: 3248 - protein, 109 aa, Synthetic construct
QAVVTQEPSLTTSPGGTVTLTCRSSSGAVTTSNYANWFQQKPGQAPRGLIGGTNDRAPWVPARFSGSLLGGKAALTISGAQPEDEAIYFCALWFSNHWVFGGGTKLTVL

SEQ ID NO: 3249 - protein, 109 aa, Synthetic construct
QAVVTQEPSLTVSPGGTVTLTCRSSSGAVTTSNYANWVQEKPGQAFRGLIGGTNDRAPWVPARFSGSLLGGKAALTLSGAQPEDEADYFCALWFSNHWVFGGGTKLTVL

SEQ ID NO: 3250 - protein, 109 aa, Synthetic construct
QAVVTQEPSLTVSPGGTVTLTCRSSSGAVTTSNYANWVQQKPGQAFAGLIGGTNDRAPGVPARFSGSLLGGKAALTISGAQPEDEADYFCALWFSNHWVFGGGTKLTVL

SEQ ID NO: 3251 - protein, 109 aa, Synthetic construct
QAVVTQESSLTTSPGGTVTLTCRSSSGAVTTSNYANWVQQKPGQAPRGLIGGTNDRAPWVPARFSGSLLGGKAALTLSGAQPEDEAIYFCALWFSNHWVFGGGTKLTVL

SEQ ID NO: 3252 - protein, 109 aa, Synthetic construct
QAVVTQEPSLTTSPGGTVTLTCRSSSGAVTTSNYANWFQQKPGQLPAGLIGGTNDRAPWVPARFSGSLLGGKAALTISGAQPEDEAIYFCALWFSNHWVFGGGTKLTVL

SEQ ID NO: 3253 - protein, 109 aa, Synthetic construct
QAVVTQEPSLTTSPGGTVTLTCRSSSGAVTTSNYANWVQEKPGQAFRGLIGGTNDRAPWVPARFSGSLLGGKAALTISGAQPEDEAIYFCALWFSNHWVFGGGTKLTVL

SEQ ID NO: 3254 - protein, 109 aa, Synthetic construct
QAVVTQESSLTTSPGGTVTLTCRSSSGAVTTSNYANWVQQKPGQLFAGLIGGTNDRAPGVPARFSGSLLGGKAALTLSGAQPEDEAIYFCALWFSNHWVFGGGTKLTVL

SEQ ID NO: 3255 - protein, 109 aa, Synthetic construct
QAVVTQESSLTTSPGGTVTLTCRSSSGAVTTSNYANWVQEKPGQLFAGLIGGTNDRAPGVPARFSGSLLGGKAALTISGAQPEDEAIYFCALWFSNHWVFGGGTKLTVL

SEQ ID NO: 3256 - protein, 109 aa, Synthetic construct
QAVVTQEPSLTVSPGGTVTLTCRSSSGAVTTSNYANWVQEKPGQLFAGLIGGTNDRAPGVPARFSGSLLGGKAALTLSGAQPEDEADYFCALWFSNHWVFGGGTKLTVL

SEQ ID NO: 3257 - protein, 109 aa, Synthetic construct
QAVVTQEPSLTVSPGGTVTLTCRSSSGAVTTSNYANWVQEKPGQLFAGLIGGTNDRAPGVPARFSGSLLGGKAALTLSGAQPEDEAIYFCALWFSNHWVFGGGTKLTVL

SEQ ID NO: 3258 - protein, 109 aa, Synthetic construct
QAVVTQEPSLTVSPGGTVTLTCRSSSGAVTTSNYANWVQEKPGQLFAGLIGGTNDRAPGVPARFSGSLLGGKAALTISGAQPEDEAIYFCALWFSNHWVFGGGTKLTVL

SEQ ID NO: 3259 - protein, 109 aa, Synthetic construct
QAVVTQEPSLTVSPGGTVTLTCRSSTGAVTTSNYANWFQQKPGQAPRTLISGTNDRAPWTPARFSGSLLGGKAALTLSGAQPEDEADYFCALWYSNHLVFGGGTKLTVL

SEQ ID NO: 3260 - protein, 109 aa, Synthetic construct
QAVVTQEPSLTVSPGGTVTLTCRSSTGAVTTSNYANWVQQKPGQAFTGLIGGTNDRAPGVPARFSGSLLGGKAALTISGAQPEDEADYFCALWYSNHLVFGGGTKLTVL

SEQ ID NO: 3261 - protein, 109 aa, Synthetic construct
QAVVTQEPSLTVSPGGTVTLTCRSSTGAVTTSNYANWVQEKPGQLFTGLIGGTNDRAPGVPARFSGSLLGGKAALTLSGAQPEDEADYFCALWYSNHLVFGGGTKLTVL

SEQ ID NO: 3262 - protein, 109 aa, Synthetic construct
QAVVTQEPSLTVSPGGTVTLTCRSSTGAVTTSNYANWVQEKPGQLFTGLIGGTNDRAPGVPARFSGSLLGGKAALTLSGAQPEDEAIYFCALWYSNHLVFGGGTKLTVL

SEQ ID NO: 3263 - protein, 109 aa, Synthetic construct
QAVVTQEPSLTVSPGGTVTLTCRSSTGAVTTSNYANWVQEKPGQLFTGLIGGTNDRAPGVPARFSGSLLGGKAALTISGAQPEDEAIYFCALWYSNHLVFGGGTKLTVL

SEQ ID NO: 3264 - protein, 109 aa, Synthetic construct
QAVVTQESSLTTSPGGTVTLTCRSSTGAVTTSNYANWVQEKPGQLFTGLIGGTNDRAPGVPARFSGSLLGGKAALTISGAQPEDEAIYFCALWYSNHLVFGGGTKLTVL

SEQ ID NO: 3265 - protein, 109 aa, Synthetic construct
QAVVTQEPALTTSPGETVTLTCRSSTGAVTTSNYANWVQEKPDHLFTGLIGGTNNRAPGVPARFSGSLIGDKAALTITGAQTEDEAIYFCVLWYSNHFIFGSGTKVTVL

SEQ ID NO: 3266 - protein, 109 aa, Synthetic construct
DAVVTQESALTTSPGETVILTCRSSTGAVTTSNYANWVQEKPDHLFTGLIGGTNNRAPGVPARFSFSLIGDKAALTITGAQTEDEAIYFCALWSNNKLVFGGGTKLTVL

SEQ ID NO: 3267 - protein, 109 aa, Synthetic construct
QAVVTQEPSLTVSPGGTVTLTCGSSTGAVTSGNYANWVQQKPGQAFRGLIGSTNTRSSGVPDRFSGSLLGGKAALTISGAQPEDEAEYYCALWYSNKLVFGGGTKLTVL

SEQ ID NO: 3268 - protein, 109 aa, Synthetic construct
QAVVTQEPSLTVSPGGTVTLTCGSSTGAVTTSNYANWVQQKPGQAFRGLIGDTSNKHSWTPARFSGSLLGGKAALTISGAQPEDEAEYYCALWSNNKLVFGGGTKLTVL

SEQ ID NO: 3269 - protein, 109 aa, Synthetic construct
QAVVTQEPSLTVSPGGTVTLTCGSSTGAVTSGNYANWVQQKPGQAFRGLIGGTNTRSSGVPDRFSGSLLGGKAALTISGAQPEDEAEYYCALWYSNKLVFGGGTKLTVL

SEQ ID NO: 3270 - protein, 109 aa, Synthetic construct
QPVVTQESALTTSPGETVTLTCRSSTGAVTTSNYANWVQEKPDHLFTGLIGGTNNRAPGVPARFSGSLIGDKAALTITGAQTEDEALYFCVLWDSNRLVFGGGTKLTVL

SEQ ID NO: 3271 - protein, 109 aa, Synthetic construct
QAVVTQESALTTSPGETVTLTCRSSTGAVTTSNYANWVQEKPDHLFTGLIGGTDNRAPGVPARFSGSLIGDKAALTITGAQTEDEAVYFCVLWDSNRLVFGGGTKLTVL

SEQ ID NO: 3272 - protein, 108 aa, Synthetic construct
AVVTQESILTTSPGETVTLTCRSSTGAVTTSNYANWVQQKPDHLFTSLIGGISNRVPGVPARFSGSLIGDKVALTIIGTQTEDEAIYFCALWYSNHLVFGGGTKLTVL

SEQ ID NO: 3273 - protein, 108 aa, Synthetic construct
AVVTQESILTTSPGETVTLTCRSSTGAVTTSNYANWVQEKPDHLFTGLIGGTNNRAPGVPARFSGSLIGDKAALTITGAQTEDEAIYFCALWYSNHLVFGGGTKLTVL

SEQ ID NO: 3274 - protein, 110 aa, Synthetic construct
DAVVTQESALTTSPGETVTLTCRSSTGAVTTSNYANWVQEKPDHLFTGLIGGTNNRAPGVPARFSGSLIGDICAALTITGAQTEDEAIYFCALWSNNKLVFGGGTKLTVL

SEQ ID NO: 3275 - protein, 108 aa, Synthetic construct
AVVTQESALTTSPGETVTLTCRSSTGAVTTSNYANWVQEKPDHLFTGLIGGTNNRAPGVPARFSGSLIGDKAALTITGAQTEDEAIYFCSLWYSNHLVFGGGTKLTVL

SEQ ID NO: 3276 - protein, 107 aa, Synthetic construct
QAVVTQESALSPGETVTLTCRSSTGAVTTSNYATWVQEKPDHLFTGLIGVTNYGPPGVPSRFSGSLIGDKAALTITGAQTEEEAMYFCALWDSNHPVFGGGTKLTVL

SEQ ID NO: 3277 - protein, 110 aa, Synthetic construct
QAVVTQESALTTSPGETVTLTCRSSTGAVTTSNYATWVQEKPDHLFTGLIGVTNYGPPGVPSRFSGSLIGDKAALTITGAQTEEEAMYFCALWDSNLIPVFGGGTKLTVL

SEQ ID NO: 3278 - protein, 103 aa, Synthetic construct
ESALTTSPGETVTLTCRSSTGAVTTSNYANWVQEKPDHLFTGLIGGTNNRAPGVPARFSGSLIGDKAALTITGAQTEDEANFCVLWYSNEILVFGGGTKLTVL

SEQ ID NO: 3279 - protein, 109 aa, Synthetic construct
QAVVTQESALTTSPGETVTLTCRSSTGAVSTSNYANWVQEKPDHLFTGLIGGANSRAPGIPARFSGSLIGDKAALTITGAQTEDEAIYFCALWFSNHWVFGGGTKLTVL

SEQ ID NO: 3280 - protein, 109 aa, Synthetic construct
QAVVTQESALTTSPGETVTLTCRSSTGAVTTSNYANWVQEKPDHLFTGLIGGTNNRAPGVPARFSGSLIGDKAALTITGAQTEDEAIYFCALWYSNHLSFGSGTKVTVL

SEQ ID NO: 3281 - protein, 109 aa, Synthetic construct
QAVVTQESALTTSPGETVTLTCRSSTGAVTTSNYANWVQEKPDHLFTGLIGGTNNRAPGVPARFSGSLIGDKAALTITGAQTEDEAIYFCALWFSNHWVFGGGTKLTVL

SEQ ID NO: 3282 - protein, 109 aa, Synthetic construct
QAVVTQESALTTSPGETVTLTCRSSTGAVTTSNYANWVQEKPDHLFTGLIGGTNNRAPGVPARFSGSLIGDKAALTITGAQTEDEAIYFCALWYNNHWVFGGGTKLTVL

SEQ ID NO: 3283 - protein, 109 aa, Synthetic construct
QAVVTQEPSLTVSPGGTVTLTCRSSTGAVTTSNYANWVQEKPGQAFRGLIGGTNNRAPGVPARFSGSLLGDKAALTLSGAQPEDEAEYFCALWYNNHWVFGGGTKLTVL

SEQ ID NO: 3284 - protein, 109 aa, Synthetic construct
QAVVTQEPSLTVSPGGTVTLTCGSSTGAVTTSNYANWVQKKPGQAFRGLIGGTNKRAPGTPARFSGSLLGGKAALTLSGAQPEDEAEYYCALWYSNLWVFGGGTKLTVL

SEQ ID NO: 3285 - protein, 109 aa, Synthetic construct
QAVVIQESALTTSPGETVTLTCRSSSGAATTSQYANWVQEKPDHLFTGLIGGSNNRAPGVPARFSGSLIGDKAALTITGAQTEDEAIYFCAIVYSNHWVFGGGTKLTVL

SEQ ID NO: 3286 - protein, 109 aa, Synthetic construct
QAVVTQESALTTSPGETVTLTCRSSTGAVTTSNYANWVQEKPDHLFTGLVGGTNNRAPGVPARFSGSLIGDKAALTITGAQTEDEAIYFCALWYSNYWVFGGGTKLTVL

SEQ ID NO: 3287 - protein, 109 aa, Synthetic construct
QAVVTQESALTTSPGETVTLTCRSSTGAVTTSNYANWVQEKPDHLFTGLIGGTSNRAPGVPARFSGSLIGDKAALTITGAQTEDEAIYFCALWYSNYWVFGGGTKLTVL

SEQ ID NO: 3288 - protein, 109 aa, Synthetic construct
QAVVTQESALTTSPGETVTLTCRSSTGAVTTSNYANWVQEKPDHLFTGLIGGTNNRAPGVPARFSGSLIGDKAALTITGAQTEDEAIYFCALWYSNYWVFGGGTKLTVL

SEQ ID NO: 3289 - protein, 109 aa, Synthetic construct
QAVVTQESALTTSPGETVTLTCRSSTGAVTTSNYANWVQEKPDHLFTGLIGGTNNRAPGAPARFSGSLIGDKAALTITGAQTEDEAIYFCALWYSNYWVFGGGTKLTVL

SEQ ID NO: 3290 - protein, 109 aa, Synthetic construct
QAVVTQESALTTSPGETVTLTCRSSTGAVTTSNYANWVQEKPDHLFTGLIGGTNNRAPGVPARFSGSLIGDKAALTIIGAQTEDEAIYFCALWYSNYWVFGGGTKLTVL

SEQ ID NO: 3291 - protein, 110 aa, Synthetic construct
DIQMTQSPSSLSASVGDRVTITCRSSTGAVTTSNYANWVQQKPGKAPKGLIGGTNKRAPGVPSRFSGSLIGDKATLTISSLQPEDFATYYCALWYSNLWVFGQGTKVEIK

SEQ ID NO: 3292 - protein, 110 aa, Synthetic construct
DIQMTQSPSSLSASVGDRVTITCRSSTGAVTTSNYANWVQQKPGKAPKGLIGGTNKRAPGVPARFSGSGSGTDFTLTISSLQPEDFATYYCALWYSNLWVFGQGTKVEIK

SEQ ID NO: 3293 - protein, 110 aa, Synthetic construct
DIQMTQSPSSLSASVGDRVTITCRSSTGAVTTSNYANWVQQKPGKAPKALIGGTNKRAPGVPSRFSGSLIGDKATLTISSLQPEDFATYYCALWYSNLWVFGQGTKVEIK

SEQ ID NO: 3294 - protein, 109 aa, Synthetic construct
QAVVTQEPSLTVSPGGTVTLTCRSSTGAVTTSNHANWFQQKPGQAPRTLIYGTNGRGSWTPARFSGSLLGGKAALTLSGAQPEDEAEYYCALWFSNHWVFGGGTKLTVL

SEQ ID NO: 3295 - protein, 111 aa, Synthetic construct
QAVVTQEPSLTVSPGGTVTLTCGSSTGAVTTSNYANWVQQKPGQAPRGLIGGTNKRAPGVPARFSGSLLGGKAALTLSGAQPEDEAEYYCALWYSNLWVFGGGTKLEIKGS

SEQ ID NO: 3296 - protein, 110 aa, Synthetic construct
EIVMTQSPATLSLSPGERATLSCRSSTGAVTTSNYANWVQQKPGQAPRGLIGGTNKRAPGVPARFSGSGSGTDFTLTISSLQPEDFAVYYCALWYSNLWVFGGGTKVEIK

SEQ ID NO: 3297 - protein, 110 aa, Synthetic construct
DIVMTQSPDSLAVSLGERATINCKSSTGAVTTSNYANWVQQKPGQPPKGLIGGTNKRAPGVPDRFSGSGSGTDFTLTISSLQAEDVAVYYCALWYSNLWVFGGGTKVEIK

SEQ ID NO: 3298 - protein, 109 aa, Synthetic construct
QAVVTQEPSLTVSPGGTVTLTCRSSTGAVTTSNYANWFQQKPGQAPRTLIYGTSNRAPWTPARFSGSLLGGKAALTLSGAQPEDEAEYFCALWYSTHFVFGTGTKVTVL

SEQ ID NO: 3299 - protein, 110 aa, Synthetic construct
EAVVTQSPATLSLSPGERATLSCRSSTGAVTTSNYAIWVQEKPGQAPRGLIGGTNNRAPGIPARFSGSLSGDDATLTISSLQPEDFAVYFCALWYSDHWVFGQGTKVEIK

SEQ ID NO: 3300 - protein, 110 aa, Synthetic construct
DIQMTQSPSSLSASVGDRVTITCRSSTGAVTTSNYANWVQQKPGKAPKGLIGGTNKRAPGVPSRFSGSLIGTDFTLTISSLQPEDFATYYCALWYSNLWVFGQGTKVEIK

SEQ ID NO: 3301 - protein, 109 aa, Synthetic construct
QSVLTQPPSVSAAPGQKVTISCRSSTGAVTTSNYANWVQQLPGTAPKGLIGGTNKRAPGIPDRFSGSKSGTSATLGITGLQTGDEADYYCALWYSNLWVFGGGTKLTVL

SEQ ID NO: 3302 - protein, 110 aa, Synthetic construct
DIQMTQSPSSLSASVGDRVTITCRSSTGAVTTSNYASWYQQKPGKAPKLLIYGTNNRAPGVPSRFSGSGSGTDFTLTISSLQPEDFATYYCALWYSNHWVFGQGTKVEIK

SEQ ID NO: 3303 - protein, 110 aa, Synthetic construct
QAVVTQEPSLTVSPGGSVTLTCRSSTGAVTTSNYANWIQQKPGQGPKTLISGTNNRGPWTTARFSGSILGDKAVLTLWGAHAEDEADYYCALWYSNHWVFGGGTHLTVQG

SEQ ID NO: 3304 - protein, 109 aa, Synthetic construct
QSALIQPPSVSGSPGQSVTISCRSSTGAVTTSNYANWVQQHPGTVPKPMIYGTNNRGPGVPDRFSGSKSGNTASMTISGLQAEDEADYFCALWYSNHWVFGGGTKLTVL

SEQ ID NO: 3305 - protein, 109 aa, Synthetic construct
  VARIANT 22: note = X can be any amino acid
  VARIANT 90: note = X can be any amino acid
QTVVTQEPSLTVSPGGTVTLTXRSSTGAVTTSNYANWVQQKPGQAFRGLIGDTNNRAPWTPARFSGSLLGGKAALTLSGVQPEDEAEYYXALWYSNHFIFGSGTKVTVL

SEQ ID NO: 3306 - protein, 110 aa, Synthetic construct
EIVMTQSPATLSVSPGERATLSCRSSTGAVTTSNYANWYQQKPGQAPRLLIYGTNKRAPGIPARFSGSGSGTEFTLTISSLQSEDFAVYYCALWYSNLWVFGGGTKVEIK

SEQ ID NO: 3307 - protein, 110 aa, Synthetic construct
EIVVTQSPATLSVSPGERATLSCRSSTGAVTTSNYANWVQQKPGQAPRGLIGGTNKRAPGVPARFSGSGSGDEATLTISSLQSEDFAVYYCALWYSNLWVFGGGTKVEIK

SEQ ID NO: 3308 - protein, 110 aa, Synthetic construct
EIVVTQSPATLSVSPGERATLSCRSSTGAVTTSNYANWVQQKPGQAPRGLIGGANKRAPGVPARFSGSLSGDEATLTISSLQSEDFAVYYCALWYSNLWVFGQGTKLEIK

SEQ ID NO: 3309 - protein, 110 aa, Synthetic construct
QSVVTQPPSVSAAPGQKVTISCSGSSSNIGNNYVSWYQQLPGTAPKLLIYDNNKRPSGIPDRFSGSKSGTSATLGIDGLRTGDEAEYFCGVWDSSLRAELFAGGTKVTVL

SEQ ID NO: 3310 - protein, 110 aa, Synthetic construct
EIVLTQSPATLSLSPGERATLSCRSSTGAVTTSNYANWVQQKPGQAPRGLIGGTNKRAPGVPARFSGSLSGTDATLTISSLQPEDFAVYYCALWYSNLWVFGGGTKVEIK

SEQ ID NO: 3311 - protein, 110 aa, Synthetic construct
EIVLTQSPATLSLSPGERATLSCRSSTGAVTTSNYANWVQQKPGQAPKGLIGGTNKRAPGVPARFSGSLSGTDATLTISSLQPEDFAVYYCALWYSNLWVFGGGTKVEIK

SEQ ID NO: 3312 - protein, 110 aa, Synthetic construct
EIVLTQSPATLSLSPGERATLSCRSSTGAVTTSNYANWVQQKPGKAPKLLIGGTNKRAPGVPARFSGSLSGTDATLTISSLQPEDFAVYYCALWYSNLWVFGGGTKVEIK

SEQ ID NO: 3313 - protein, 110 aa, Synthetic construct
EIVLTQSPATLSLSPGERATLSCRSSTGAVTTSNYANWVQQKPGKAPKSLIGGTNKRAPGVPARFSGSLSGTDATLTISSLQPEDFAVYYCALWYSNLWVFGGGTKVEIK

SEQ ID NO: 3314 - protein, 110 aa, Synthetic construct
EIVMTQSPATLSLSPGERATLSCRSSTGAVTTSNYANWVQQKPGQAPKGLIGGTNKRAPGVPARFSGSLSGTDATLTISSLQPEDFAVYYCALWYSNLWVFGGGTKVEIK

SEQ ID NO: 3315 - protein, 110 aa, Synthetic construct
EIVMTQSPATLSLSPGERATLSCRSSTGAVTTSNYANWVQQKPGKAPKLLIGGTNKRAPGVPARFSGSLSGTDATLTISSLQPEDFAVYYCALWYSNLWVFGGGTKVEIK

SEQ ID NO: 3316 - protein, 110 aa, Synthetic construct
EIVMTQSPATLSLSPGERATLSCRSSTGAVTTSNYANWVQQKPGKAPKSLIGGTNKRAPGVPARFSGSLSGTDATLTISSLQPEDFAVYYCALWYSNLWVFGGGTKVEIK

SEQ ID NO: 3317 - protein, 112 aa, Synthetic construct
DIVMTQSPLSLPVTPGEPASISCRSSKNLLHSNGITYLYWYLQKPGQSPQLLIYQMSNLASGVPDRFSSSGSGTDFTLKISRVEAEDVGVYYCAQNLEIPRTFGQGTKVEIK

SEQ ID NO: 3318 - protein, 107 aa, Synthetic construct [sequence omitted]

SEQ ID NO: 3319 - protein, 107 aa, Synthetic construct [sequence omitted]

SEQ ID NO: 3320 - protein, 110 aa, Synthetic construct
EIVVTQSPATLSVSPGERATLSCRSSTGAVTTSNYANWVQEKPGQAFRGLIGGANKRAPGVPARFSGSLSGDEATLTISSLQSEDFAVYYCALWYSNLWVFGQGTKLEIK

SEQ ID NO: 3321 - protein, 110 aa, Synthetic construct
EIVVTQSPATLSVSPGERATLSCRSSTGAVTAANYANWVQEKPGQAFRGLIGGANKRAPGVPARFSGSLSGDEATLTISSLQSEDFAVYYCALFYSNLWVFGQGTKLEIK

SEQ ID NO: 3322 - protein, 110 aa, Synthetic construct
EIVVTQSPATLSVSPGERATLSCRSSTGAVTESNYANWVQEKPGQAFRGLIGGANKRAPGVPARFSGSLSGDEATLTISSLQSEDFAVYYCALFYSNTWVFGQGTKLEIK

SEQ ID NO: 3323 - protein, 110 aa, Synthetic construct
EIVVTQSPATLSVSPGERATLSCRSSTGAVTAANYANWVQEKPGQAFRGLIGGANKRAPGVPARFSGSLSGDEATLTISSLQSEDFAVYYCALFYSNTWVFGQGTKLEIK

SEQ ID NO: 3324 - protein, 109 aa, Synthetic construct
QTVVTQEPSLSVSPGGTVTLTCRSSTGAVTTSNYANWYQQTQGRAPRTIIYGPNNRAPGVPSRFSGSISGNKATLTITGARPEDEADYHCALWYSNHWVFGGGTHLTVL

SEQ ID NO: 3325 - protein, 107 aa, Synthetic construct [sequence omitted]

SEQ ID NO: 3326 - protein, 107 aa, Synthetic construct
DIQMTQSPSSLSASVGDRVTITCRASQDVSTAVAWYQQKPGKAPKLLIYSASFLYSGVPSRFSGSGSGTDFTLTISSLQPEDFATYYCQQSYTTPPTFGQGTKVEIK

SEQ ID NO: 3327 - protein, 107 aa, Synthetic construct
DIQMTQSPSSLSASVGDRVTITCRASQVIRRSLAWYQQKPGKAPKLLIYAASNLASGVPSRFSGSGSGTDFTLTISSLQPEDFATYYCQQSNTSPLTFGQGTKVEIK

SEQ ID NO: 3328 - protein, 108 aa, Synthetic construct
DIQMTQTTSSLSASLGDRVTISCRASQDISKTLNWYQQKPDGTVKLLIYHTSRLHSGVPSRFSGSGSGTDYSLTISNLEQEDIATYFCQQGNTLPYTFGGGTKLEITR

SEQ ID NO: 3329 - protein, 109 aa, Synthetic construct
SAEVTQPPSVSVSPGQTARITCSSNTGAVTTSNYANWVQQKPGQAPVGLIGGTNERPSGIPERFSGSSSGNTATLTISGAQAEDEADYYCALWYSNHWVFGGGTKLTVL

SEQ ID NO: 3330 - protein, 110 aa, Synthetic construct
DAQVTQSPSSLSASVGDRVTITCRSSTGAVTTSNYANWVQEKPGKLFKGLIGGTNKRAPGVPSRFSGSGSGTDATLTISSLQPEDFATYFCALWYSNLWVFGGGTKVEIK

SEQ ID NO: 3331 - protein, 112 aa, Synthetic construct
DIQLVVTQEPSFSVSPGGTVTFTCRSSAGAVTTSNYANWVQEKPGQAPRGLIGGTTNRAPGVPARFSGSILGNKAALTITGAQADDESIYFCVLWYSDRWVFGGGTKLKIKR

SEQ ID NO: 3332 - protein, 110 aa, Synthetic construct
  VARIANT 1: note = X can be any amino acid
XDAVVTQESALTSSPGETVTLTCRSSTGAVTTSNYASWVQEKPDHLFTGLIGGTNNRAPGVPARFSGSLIGDKAALTITGAQTEDEAIYFCVLWYSDHWVFGCGTKLTVL

SEQ ID NO: 3333 - protein, 111 aa, Synthetic construct
EIVMTQSPSTLSASVGDRVIITCQSSQSVYGNIWMAWYQQKPGRAPKLLIYQASKLASGVPSRFSGSGSGAEFTLTISSLQPDDFATYYCQGNFNTGDRYAFGQGTKVEIK

SEQ ID NO: 3334 - protein, 110 aa, Synthetic construct
DAQLTQSPILLSASVGDRVTITCRSSTGAVTTSNYANWVQERTNGSFRGLIGGTNNRVPGVPSRFSGSLSGDDATLTISSLQPEDEADYFCVLWHSNHWVFGAGTKVEIK

SEQ ID NO: 3335 - protein, 110 aa, Synthetic construct
DIGMTQSPSSLSASVGDRVTITCRSSTGAVTTSNYANWVQQKPGKAPKGLIGGTNKRAPGVPSRFSGSLIGDKATLTISSLQPEDFATYYCALWYSNLWVFGQGTKVEIK

SEQ ID NO: 3336 - protein, 110 aa, Synthetic construct
DIGMTQSPSSLSASVGDRVTITCRSSTGAVTTSNYANWVQQKPGKAPKGLIGGTNKRAPGVPARFSGSGSGTDFTLTISSLQPEDFATYYCALWYSNLWVFGQGTKVEIK

SEQ ID NO: 3337 - protein, 110 aa, Synthetic construct
DIGMTQSPSSLSASVGDRVTITCRSSTGAVTTSNYANWVQQKPGKAPKALIGGTNKRAPGVPSRFSGSLIGDKATLTISSLQPEDFATYYCALWYSNLWVFGQGTKVEIK

SEQ ID NO: 3338 - protein, 66 aa, Synthetic construct
MNSINATAAPIDDNVLGDRIGAATRGLLSLKQSDGHFVFELEADATIPSEYILMRHYLGEPVDTVL

SEQ ID NO: 3339 - protein, 110 aa, Synthetic construct
DIGMTQSPSSLSASVGDRVTITCRSSTGAVTTSNYANWVQQKPGKAPKGLIGGTNKRAPGVPSRFSGSLIGTDFTLTISSLQPEDFATYYCALWYSNLWVFGQGTKVEIK

SEQ ID NO: 3340 - protein, 110 aa, Synthetic construct
QSVLTQPPSASGTPGQRVTISCSGSRSNIGSNTVNWYQQLPGTAPKLLIYGNNQRPSGVPDRFSGSKSGSSASLAISGLQSEDEADYYCATWDDSLIGWVFGGGTKLTVL

SEQ ID NO: 3341 - protein, 110 aa, Synthetic construct
QSVLTQPPSASGTPGQRVTISCSGSRSNIGSNTVNWYQQLPGTAPKLLIYGNNQRPSGVPDRFSGSKSGTSASLAISGLQSEDEADYYCATWDDSLIGWVFGGGTKLTVL

SEQ ID NO: 3342 - protein, 110 aa, Synthetic construct
DIGMTQSPSSLSASVGDRVTITCRSSTGAVTTSNYASWYQQKPGKAPKLLIYGTNNRAPGVPSRFSGSGSGTDFTLTISSLQPEDFATYYCALWYSNHWVFGQGTKVEIK

SEQ ID NO: 3343 - protein, 98 aa, Synthetic construct
QAVVTQEPSLTVSPGGTVTLTCRSSTGAVTTSNYASWFQQKPGQAPRTLIYGTNNRAPWTPARFSGSLLGGKAALTLSGAQPEDEAEYYCLLSYSGAR

SEQ ID NO: 3344 - protein, 129 aa, Synthetic construct
MTWTPLLFLTLLLHCTGSLSELVVTQEPSLTVSPGGTVTLTCRSSTGAVTTSNYANWVQQKPGQAPRGLIGGTNKRAPGTPARFSGSLLGGKAALTLSGVQPEDEAEYYCALWYSNLWVFGGGTKLTVL

SEQ ID NO: 3345 - protein, 119 aa, Synthetic construct
ASPAAPAPSAELVVTQEPSLTVSPGGTVTLTCRSSTGAVTTSNYANWVQQKPGQAPRGLIGGTNKRAPGTPARFSGSLLGGKAALTLSGVQPEDEAEYYCALWYSNLWVFGGGTKLTVL

SEQ ID NO: 3346 - protein, 128 aa, Synthetic construct
MAWISLILSLLALSSGAISQSVVTQESALTTSPGETVTLTCRSSTGAVTTSNYANWVQEKPDHLFTGLIGGTNNRAPGVPARFSGSLIGDKAALTITGAQTEDEAIYFCGLWYSNHWVFGGGTKLTVL

SEQ ID NO: 3347 - protein, 107 aa, Synthetic construct
DIGMTQSPSSLSASVGDRVTITCRASQDVNTAVAWYQQKPGKAPKLLIYSASFLYSGVPSRFSGSRSGTDFTLTISSLQPEDFATYYCQQHYTTPPTFGQGTKVEIK

SEQ ID NO: 3348 - protein, 107 aa, Synthetic construct
DIGMTQSPSSLSASVGDRVTITCKASQDVSIGVAWYQQKPGKAPKLLIYSASYRYTGVPSRFSGSGSGTDFTLTISSLQPEDFATYYCQQYYIYPYTFGQGTKVEIK

SEQ ID NO: 3349 - protein, 109 aa, Synthetic construct
DIGMTQEPSLTTSPGGTVTLTCRSSTGAVTTSNYANWVQEKPGQAPRGLIGGTNKRAPGTPARFSGSLIGGKAALTITGVQPEDEAIYFCALWYSNLWVFGGGTKLEIK

SEQ ID NO: 3350 - protein, 106 aa, Synthetic construct
DIGMTQEPSLTTSPGGTVTLTCRSSTGAVTTSNYANWVQEKPGQAPRGLIGGTNKRAPGTPARFSGSLIGGKAALTITGVQPEDEAIYFCALWYSNLWVFGGGTKL

SEQ ID NO: 3351 - protein, 123 aa, Synthetic construct
SAMALSSFSMSLPFAKLPSTSKSTRFLPIRASSAAAAASPSFDLRLYWTSLIADVEAELDAAMPIRTPERIHSAMRYAVLPGAGNEGTAKRAPPVLCVAACELLGARAKAALPAAVALEMLHA

SEQ ID NO: 3352 - protein, 120 aa, Synthetic construct
  VARIANT 53: note = X can be any amino acid
  VARIANT 66: note = X can be any amino acid
  VARIANT 79: note = X can be any amino acid
CTLGASPLRPSTCFCIIFQTRPRQSDCMIVSGTLTNKRAPALRKVYDQMPETXDGLSQCENELVDXGYYHYSYSANERXDGIVPDDIYNPRCSPTADALLCGLLQLLIMIYTLQDFLHWR

SEQ ID NO: 3353 - protein, 105 aa, Synthetic construct
  VARIANT 24: note = X can be any amino acid
MATSAIQQSAFTGQTALKQLNEVXRRTGAPGKGGPTRPGTVKRAPKSIGKGPAGPRSWGPCSKQIPSYRTGDYLGTSGGNTAELSVDPETLARNRELEVIHSRWA

SEQ ID NO: 3354 - protein, 99 aa, Synthetic construct
HEAPPSASPPAGASKAVVFVISNVDDLMNWAWRGSIWSMTFRLLCCSEEMMYTGAACYDLHRFCIIFRTSPRQSDCVIVSGSLTNKRAPALRKVYDPMP

SEQ ID NO: 3355 - protein, 117 aa, Synthetic construct
CKENQVVYGIHIGPLNNSLQNGLSWSSGLGRGTNKQAPNFNVLAVFSTGGEKGGAKVKRTGPSDSRAALSSNLNPNNHDAFHSEENYDQITHYQRSEHCIRCKPHILLQVPGSHHNL

SEQ ID NO: 3356 - protein, 101 aa, Synthetic construct
KRGGPNANQGKQQVERENRAAPMGNNPTEKKGEVSKTQKVGKAKGGPNTTVEKWGQPKVIKAPQKKKKNRQAHGGNTGTQKRAPPRRGKKQGTPKTAALNF

SEQ ID NO: 3357 - protein, 86 aa, Synthetic construct
KKNLLSFQNWGLGPFPRGLFFAPLGEKMVLVIPPWAPNFPEGGDLPHFPPRGGGAPGENWRIKFGPLGPPLFPGRVGTNTRAPFPP

SEQ ID NO: 3358 - protein, 123 aa, Synthetic construct
GNRLERRQGRGPLGIPDGAKRGKAPRAKKGGNPRAFQRGTWRKSPKRRSLRAAPEKKMGGTEQEVRLGTQKRAPLGPPEGRRYLFSLFLFWFFFFFFFFFFFFFFFFFFFFSQDLVLTYNENP

SEQ ID NO: 3359 - protein, 127 aa, Synthetic construct
  VARIANT 10: note = X can be any amino acid
  VARIANT 48: note = X can be any amino acid
TATTTTKHTXTAAPRTADATAAGTRRSDAAATPRLGKTKKAAPGPESXWGTNKRATKAAQATDQNNERKDEQNMKKAAGRARHARGHAHQRGRDGQVQRARPCMEPTNAAFKKKKAAVLNRREKQEQ

SEQ ID NO: 3360 - protein, 97 aa, Synthetic construct
RFVVRPLLQVVQAWDLDARRLGPGAEAGTPVKVVFTFRIGVGTRKRAPGKQPRTGPPILKGPKCPGSNEEKTTRSRKSDIPALPKQLGKSSGAFRSR

SEQ ID NO: 3361 - protein, 106 aa, Synthetic construct
MVGLSNDSDDSEEFDFEENAYDVEDQPSKPSHVFFTESTIKKGHVEVHKFIYINSKSTVWNTIDYSGQEKLFWNFTCARTVRDTNKRAPSETKLEPFGLRRRPSAR

SEQ ID NO: 3362 - protein, 86 aa, Synthetic construct
METDTLLLWVLLLWVPGSTGRPSFSLVEDTTLEPEEPPTKYQISQPEVYVAAPGESLEVRCLLKDAAVISWTKDGVHLGPNNRTVL

SEQ ID NO: 3363 - protein, 125 aa, Synthetic construct
MWQLLLPTALLLLVSADIVVTQESALTTSPGETVTLTCRSSTGAVTTSNYANWVQEKPDHLFTGLIGGTNNRAPGVPARFSGSLIGDKAALTITGAQTEDEAIYFCALWYSNHWVFGGGTKLTVL

SEQ ID NO: 3364 - protein, 90 aa, Synthetic construct
DIGMTQSPSSLSASVGDRVTITCRASQSVSSAVAWYQQKPGKAPKLLIYSASSLYSGVPSRFSGSRSGTDFTLTISSLQPEDFATYYCQQ

SEQ ID NO: 3365 - protein, 109 aa, Synthetic construct
QTVVTQEPSLTVSPGGTVTLTCGSSTGAVTSGYYPNWVQQKPGQAPRGLIGGTKFLAPGTPARFSGSLLGGKAALTLSGVQPEDEAEYYCALWYSNRWVFGGGTKLTVL

SEQ ID NO: 3366 - protein, 109 aa, Synthetic construct
ELVVTQEPSLTVSPGGTVTLTCGSSTGAVTSGYYPNWVQQKPGQAPRGLIGGTKFLAPGTPARFSGSLLGGKAALTLSGVQPEDEAEYYCALWYSNRWVFGGGTKLTVL

SEQ ID NO: 3367 - protein, 109 aa, Synthetic construct
QTVVTQEPSLTVSPGGTVTLTCRSSTGAVTSGYYPNWVQQKPGQAPRGLIGATDMRPSGTPARFSGSLLGGKAALTLSGVQPEDEAEYYCALWYSNRWVFGGGTKLTVL

SEQ ID NO: 3368 - protein, 109 aa, Synthetic construct
ELVVTQEPSLTVSPGGTVTLTCRSSTGAVTSGYYPNWVQQKPGQAPRGLIGATDMRPSGTPARFSGSLLGGKAALTLSGVQPEDEAEYYCALWYSNRWVFGGGTKLTVL

SEQ ID NO: 3369 - protein, 109 aa, Synthetic construct
QTVVTQEPSLTVSPGGTVTLTCGSSTGAVTKGNYPNWVQQKPGQAPRGLIGGTKMLAPGTPARFSGSLLGGKAALTLSGVQPEDEAEYYCALWYSNRWVFGGGTKLTVL

SEQ ID NO: 3370 - protein, 110 aa, Synthetic construct
EIVVTQSPATLSVSPGERATLSCRSSTGAVTTSNYANWVQEKPGQAPRGLIGGANKRAPGVPARFSGSLSGDEATLTISSLQSEDFAVYFCALWYSNLWVFGQGTKLEIK

SEQ ID NO: 3371 - protein, 110 aa, Synthetic construct
EIVVTQSPATLSVSPGERATLSCRSSTGAVTTSNYANWVQEKPGQAFRGLIGGANKRAPGVPARFSGSGSGDEATLTISSLQSEDFAVYFCALWYSNLWVFGQGTKLEIK

SEQ ID NO: 3372 - protein, 110 aa, Synthetic construct
EAVVTQSPATLSVSPGERATLSCRSSTGAVTTSNYANWVQEKPGQAFRGLIGGANKRAPGVPARFSGSGSGTEATLTISSLQSEDFAVYFCALWYSNLWVFGQGTKLEIK

SEQ ID NO: 3373 - protein, 110 aa, Synthetic construct
EIVVTQSPATLSVSPGERATLSCRSSTGAVTTSNYANWVQEKPGQAFRGLIGGANKRAPGVPARFSGSLSGTEATLTISSLQSEDFAVYFCALWYSNLWVFGQGTKLEIK

SEQ ID NO: 3374 - protein, 110 aa, Synthetic construct
EIVVTQSPATLSVSPGERATLSCRASTGAVTTSNYANWVQEKPGQAFRGLIGGANKRAPGVPARFSGSLSGDEATLTISSLQSEDFAVYFCALWYSNLWVFGQGTKLEIK

SEQ ID NO: 3375 - protein, 110 aa, Synthetic construct
EIVVTQSPATLSVSPGERATLSCRSSTGAVTTSNYANWVQEKPGQAFRGLIGGANKRAPGVPARFSGSLSGTEATLTISSLQSEDFAVYYCALWYSNLWVFGQGTKLEIK

SEQ ID NO: 3376 - protein, 110 aa, Synthetic construct
EIVVTQSPATLSVSPGERATLSCRSSTGAVTTSNYANWVQQKPGQAFRGLIGGANKRAPGVPARFSGSLSGTEATLTISSLQSEDFAVYYCALWYSNLWVFGQGTKLEIK

SEQ ID NO: 3377 - protein, 110 aa, Synthetic construct
EIVVTQSPATLSVSPGERATLSCRSSTGAVTTSNYANWVQQKPGQAFRGLIGGANKRAPGVPARFSGSLSGDEATLTISSLQSEDFAVYYCALWYSNLWVFGQGTKLEIK

SEQ ID NO: 3378 - protein, 112 aa, Synthetic construct
TDSQTVATQEPSLSVSPGGTVTLTCRSSTGAVTTSNYANWVQQTQGRAPRGIIGGPNNRAPGVPSRFSGSISGNKATLTITGARPEDEADYFCALWYSNHWVFGGGTHLTVL

SEQ ID NO: 3379 - protein, 111 aa, Synthetic construct
DIVLTQSPASLPVSLGQRATISCRASQSVSSSTYSYIHWYQQKPGQPPKLLITYASNLESGVPARFSGSGSGTDFTLDIHPVEEDDSSTYYCQHSWEIPFTFGSGTKLEIK

SEQ ID NO: 3380 - protein, 107 aa, Synthetic construct
DIQMTQSPSSMSVSVGDRVTITCHSSQDINSNIGWLQQKPGKSFKGLIYHGTNLDDGVPSRFSGSGSGTDYTLTISSLQPEDFATYYCVQYAQFPWTFGGGTKLEIK
